(19) United States
(12) Patent Application Publication
(10) Pub. No.: US 2024/0209119 A1
(43) Pub. Date: Jun. 27, 2024

(54) MUSCLE TARGETING COMPLEXES AND USES THEREOF FOR TREATING DYSTROPHINOPATHIES

(71) Applicant: DYNE THERAPEUTICS, INC., Waltham, MA (US)

(72) Inventors: Cody A. Desjardins, Waltham, MA (US); Kim Tang, Waltham, MA (US); James McSwiggen, Arvada, CO (US); Romesh R. Subramanian, Framingham, MA (US); Timothy Weeden, Waltham, MA (US); Mohammed T. Qatanani, Waltham, MA (US); Brendan Quinn, Waltham, MA (US); John Najim, Waltham, MA (US)

(73) Assignee: DYNE THERAPEUTICS, INC., Waltham, MA (US)

(21) Appl. No.: 18/577,462

(22) PCT Filed: Jul. 8, 2022
(86) PCT No.: PCT/US22/73528

§ 371 Date: Jan. 8, 2024

Related U.S. Application Data
(60) Provisional application No. 63/219,977, filed on Jul. 9, 2021.

(51) Int. Cl. C07K 19/00; A61K 48/00; C07K 16/28; C12N 15/113

(52) U.S. Cl. CPC C07K 19/00; A61K 48/0058; C07K 16/2881; C12N 15/113; C12N 2310/314; C12N 2310/3233

(57) ABSTRACT

Aspects of the disclosure relate to complexes comprising a muscle-targeting agent covalently linked to a molecular pay load. In some embodiments, the muscle-targeting agent specifically binds to an internalizing cell surface receptor on muscle cells. In some embodiments, the molecular payload promotes the expression or activity of a functional dystrophin protein. In some embodiments, the molecular payload is an oligonucleotide, such as an antisense oligonucleotide. e.g., an oligonucleotide that causes exon skipping in a mRNA expressed from a mutant DMD allele.

### RELATED APPLICATIONS

[0001] This application claims priority under 35 U.S.C. § 119(c) to U.S. Provisional Application Ser. No. 63/219,977, entitled “MUSCLE TARGETING COMPLEXES AND USES THEREOF FOR TREATING DYSTROPHINOPATHIES”, filed on Jul. 9, 2021, the contents of which are incorporated herein by reference in their entirety.

### FIELD OF THE INVENTION

[0002] The present application relates to targeting complexes for delivering molecular payloads (e.g., oligonucleotides) to cells and uses thereof, particularly uses relating to treatment of disease.

### REFERENCE TO AN ELECTRONIC SEQUENCE LISTING

[0003] The contents of the electronic sequence listing (D082470064WO00-SEQ-COB.xml; Size: 1,479,992 bytes; and Date of Creation: Jul. 7, 2022) are herein incorporated by reference in their entirety.

### BACKGROUND OF INVENTION

[0004] Dystrophinopathies are a group of distinct neuromuscular diseases that result from mutations in the gene encoding dystrophin. Dystrophinopathies include Duchenne muscular dystrophy, Becker muscular dystrophy, and X-linked dilated cardiomyopathy. The DMD gene (“DMD”), which encodes dystrophin, is a large gene, containing 79 exons and about 2.6 million total base pairs. Numerous mutations in DMD, including exonic frameshift, deletion, substitution, and duplicative mutations, are able to diminish the expression of functional dystrophin, leading to dystrophinopathies. Several agents that target exons of human DMD have been approved by the U.S. Food and Drug Administration (FDA), including casimersen, viltolarsen, golodirsen, and eteplirsen. Of these, casimersen targets exon 45.

### SUMMARY OF INVENTION

[0005] According to some aspects, the disclosure provides complexes that target muscle cells for purposes of delivering molecular payloads to those cells, as well as molecular payloads that can be used therein. In some embodiments, complexes provided herein are particularly useful for delivering molecular payloads that increase or restore expression or activity of functional dystrophin protein. In some embodiments, complexes comprise oligonucleotide based molecular payloads that promote expression of functional dystrophin protein through an in-frame exon skipping mechanism or suppression of stop codons, such as by facilitating skipping of DMD exon 45. In some embodiments, molecular payloads provided herein are useful for facilitating exon skipping in a DMD sequence, such as skipping of DMD exon 45. Accordingly, in some embodiments, complexes provided herein comprise muscle-targeting agents (e.g., muscle targeting antibodies) that specifically bind to receptors on the surface of muscle cells for purposes of delivering molecular payloads to the muscle cells. In some embodiments, the complexes are taken up into the cells via a receptor mediated internalization, following which the molecular payload may be released to perform a function inside the cells. For example, complexes engineered to deliver oligonucleotides may release the oligonucleotides such that the oligonucleotides can promote expression of functional dystrophin protein (e.g., through an exon skipping mechanism, such as by facilitating skipping of DMD exon 45) in the muscle cells. In some embodiments, the oligonucleotides are released by endosomal cleavage of covalent linkers connecting oligonucleotides and muscle-targeting agents of the complexes. Complexes and molecular payloads provided herein can be used for treating subjects having a mutated DMD gene, such as a mutated DMD gene that is amenable to exon 45 skipping.

[0006] According to some aspects, complexes comprising an anti-transferrin receptor 1 (TfR1) antibody covalently linked to an oligonucleotide configured for inducing skipping of exon 45 in a DMD pre-mRNA are provided herein, wherein the oligonucleotide comprises a region of complementarity that is complementary with at least 8 consecutive nucleotides of any one of SEQ ID NOs: 240, 236, 280, 211, 197, 212, 208, 217, 213, 195, 160-194, 196, 198-207, 209, 210, 214-216, 218-235, 237-239, 241-279, and 281-399.

[0007] In some embodiments, the anti-TfR1 antibody comprises:
[0008] (i) a heavy chain complementarity determining region 1 (CDR-H1) of SEQ ID NO: 33, a heavy chain complementarity determining region 2 (CDR-H2) of SEQ ID NO: 34, a heavy chain complementarity determining region 3 (CDR-H3) of SEQ ID NO: 35, a light chain complementarity determining region 1 (CDR-L1) of SEQ ID NO: 36, a light chain complementarity determining region 2 (CDR-L2) of SEQ ID NO: 37, and a light chain complementarity determining region 3 (CDR-L3) of SEQ ID NO: 32;
[0009] (ii) a CDR-H1 of SEQ ID NO: 7, a CDR-H2 of SEQ ID NO: 8, a CDR-H3 of SEQ ID NO: 9, a CDR-L1 of SEQ ID NO: 10, a CDR-L2 of SEQ ID NO: 11, and a CDR-L3 of SEQ ID NO: 6;
[0010] (iii) a CDR-H1 of SEQ ID NO: 7, a CDR-H2 of SEQ ID NO: 20, a CDR-H3 of SEQ ID NO: 9, a CDR-L1 of SEQ ID NO: 10, a CDR-L2 of SEQ ID NO: 11, and a CDR-L3 of SEQ ID NO: 6;
[0011] (iv) a CDR-H1 of SEQ ID NO: 7, a CDR-H2 of SEQ ID NO: 24, a CDR-H3 of SEQ ID NO: 9, a CDR-L1 of SEQ ID NO: 10, a CDR-L2 of SEQ ID NO: 11, and a CDR-L3 of SEQ ID NO: 6;
[0012] (v) a CDR-H1 of SEQ ID NO: 51, a CDR-H2 of SEQ ID NO: 52, a CDR-H3 of SEQ ID NO: 53, a CDR-L1 of SEQ ID NO: 54, a CDR-L2 of SEQ ID NO: 55, and a CDR-L3 of SEQ ID NO: 50;
[0013] (vi) a CDR-H1 of SEQ ID NO: 64, a CDR-H2 of SEQ ID NO: 52, a CDR-H3 of SEQ ID NO: 53, a CDR-L1 of SEQ ID NO: 54, a CDR-L2 of SEQ ID NO: 55, and a CDR-L3 of SEQ ID NO: 50; or
[0014] (vii) a CDR-H1 of SEQ ID NO: 67, a CDR-H2 of SEQ ID NO: 52, a CDR-H3 of SEQ ID NO: 53, a CDR-L1 of SEQ ID NO: 54, a CDR-L2 of SEQ ID NO: 55, and a CDR-L3 of SEQ ID NO: 50.

[0015] In some embodiments, the anti-TfR1 antibody comprises:
[0016] (i) a heavy chain variable region (VH) comprising an amino acid sequence at least 85% identical to SEQ ID NO: 76; and/or a light chain variable region (VL) comprising an amino acid sequence at least 85% identical to SEQ ID NO: 75;
[0017] (ii) a VH comprising an amino acid sequence at least 85% identical to SEQ ID NO: 69; and/or a VL comprising an amino acid sequence at least 85% identical to SEQ ID NO: 70;
[0018] (iii) a VH comprising an amino acid sequence at least 85% identical to SEQ ID NO: 71; and/or a VL comprising an amino acid sequence at least 85% identical to SEQ ID NO: 70;
[0019] (iv) a VH comprising an amino acid sequence at least 85% identical to SEQ ID NO: 72; and/or a VL comprising an amino acid sequence at least 85% identical to SEQ ID NO: 70;
[0020] (v) a VH comprising an amino acid sequence at least 85% identical to SEQ ID NO: 73; and/or a VL comprising an amino acid sequence at least 85% identical to SEQ ID NO: 74;
[0021] (vi) a VH comprising an amino acid sequence at least 85% identical to SEQ ID NO: 73; and/or a VL comprising an amino acid sequence at least 85% identical to SEQ ID NO: 75;
[0022] (vii) a VH comprising an amino acid sequence at least 85% identical to SEQ ID NO: 76; and/or a VL comprising an amino acid sequence at least 85% identical to SEQ ID NO: 74;
[0023] (viii) a VH comprising an amino acid sequence at least 85% identical to SEQ ID NO: 77; and/or a VL comprising an amino acid sequence at least 85% identical to SEQ ID NO: 78;
[0024] (ix) a VH comprising an amino acid sequence at least 85% identical to SEQ ID NO: 79; and/or a VL comprising an amino acid sequence at least 85% identical to SEQ ID NO: 80; or
[0025] (x) a VH comprising an amino acid sequence at least 85% identical to SEQ ID NO: 77; and/or a VL comprising an amino acid sequence at least 85% identical to SEQ ID NO: 80.

[0026] In some embodiments, the anti-TfR1 antibody comprises:
[0027] (i) a VH comprising the amino acid sequence of SEQ ID NO: 76 and a VL comprising the amino acid sequence of SEQ ID NO: 75;
[0028] (ii) a VH comprising the amino acid sequence of SEQ ID NO: 69 and a VL comprising the amino acid sequence of SEQ ID NO: 70;
[0029] (iii) a VH comprising the amino acid sequence of SEQ ID NO: 71 and a VL comprising the amino acid sequence of SEQ ID NO: 70;
[0030] (iv) a VH comprising the amino acid sequence of SEQ ID NO: 72 and a VL comprising the amino acid sequence of SEQ ID NO: 70;
[0031] (v) a VH comprising the amino acid sequence of SEQ ID NO: 73 and a VL comprising the amino acid sequence of SEQ ID NO: 74;
[0032] (vi) a VH comprising the amino acid sequence of SEQ ID NO: 73 and a VL comprising the amino acid sequence of SEQ ID NO: 75;
[0033] (vii) a VH comprising the amino acid sequence of SEQ ID NO: 76 and a VL comprising the amino acid sequence of SEQ ID NO: 74;
[0034] (viii) a VH comprising the amino acid sequence of SEQ ID NO: 77 and a VL comprising the amino acid sequence of SEQ ID NO: 78;
[0035] (ix) a VH comprising the amino acid sequence of SEQ ID NO: 79 and a VL comprising the amino acid sequence of SEQ ID NO: 80; or
[0036] (x) a VH comprising the amino acid sequence of SEQ ID NO: 77 and a VL comprising the amino acid sequence of SEQ ID NO: 80.

[0037] In some embodiments, the anti-TfR1 antibody is a Fab fragment, a Fab′ fragment, a F(ab′)2 fragment, an scFv, an Fv, or a full-length IgG.

[0038] In some embodiments, the anti-TfR1 antibody is a Fab fragment.

[0039] In some embodiments, the anti-TfR1 antibody comprises:
[0040] (i) a heavy chain comprising an amino acid sequence at least 85% identical to SEQ ID NO: 101; and/or a light chain comprising an amino acid sequence at least 85% identical to SEQ ID NO: 90;
[0041] (ii) a heavy chain comprising an amino acid sequence at least 85% identical to SEQ ID NO: 97; and/or a light chain comprising an amino acid sequence at least 85% identical to SEQ ID NO: 85;
[0042] (iii) a heavy chain comprising an amino acid sequence at least 85% identical to SEQ ID NO: 98; and/or a light chain comprising an amino acid sequence at least 85% identical to SEQ ID NO: 85;
[0043] (iv) a heavy chain comprising an amino acid sequence at least 85% identical to SEQ ID NO: 99; and/or a light chain comprising an amino acid sequence at least 85% identical to SEQ ID NO: 85;
[0044] (v) a heavy chain comprising an amino acid sequence at least 85% identical to SEQ ID NO: 100; and/or a light chain comprising an amino acid sequence at least 85% identical to SEQ ID NO: 89;
[0045] (vi) a heavy chain comprising an amino acid sequence at least 85% identical to SEQ ID NO: 100; and/or a light chain comprising an amino acid sequence at least 85% identical to SEQ ID NO: 90;
[0046] (vii) a heavy chain comprising an amino acid sequence at least 85% identical to SEQ ID NO: 101; and/or a light chain comprising an amino acid sequence at least 85% identical to SEQ ID NO: 89;
[0047] (viii) a heavy chain comprising an amino acid sequence at least 85% identical to SEQ ID NO: 102; and/or a light chain comprising an amino acid sequence at least 85% identical to SEQ ID NO: 93;
[0048] (ix) a heavy chain comprising an amino acid sequence at least 85% identical to SEQ ID NO: 103; and/or a light chain comprising an amino acid sequence at least 85% identical to SEQ ID NO: 95; or
[0049] (x) a heavy chain comprising an amino acid sequence at least 85% identical to SEQ ID NO: 102; and/or a light chain comprising an amino acid sequence at least 85% identical to SEQ ID NO: 95.

[0050] In some embodiments, the anti-TfR1 antibody comprises:
[0051] (i) a heavy chain comprising the amino acid sequence of SEQ ID NO: 101; and a light chain comprising the amino acid sequence of SEQ ID NO: 90;
[0052] (ii) a heavy chain comprising the amino acid sequence of SEQ ID NO: 97; and a light chain comprising the amino acid sequence of SEQ ID NO: 85;
[0053] (iii) a heavy chain comprising the amino acid sequence of SEQ ID NO: 98; and a light chain comprising the amino acid sequence of SEQ ID NO: 85;
[0054] (iv) a heavy chain comprising the amino acid sequence of SEQ ID NO: 99; and a light chain comprising the amino acid sequence of SEQ ID NO: 85;
[0055] (v) a heavy chain comprising the amino acid sequence of SEQ ID NO: 100; and a light chain comprising the amino acid sequence of SEQ ID NO: 89;
[0056] (vi) a heavy chain comprising the amino acid sequence of SEQ ID NO: 100; and a light chain comprising the amino acid sequence of SEQ ID NO: 90;
[0057] (vii) a heavy chain comprising the amino acid sequence of SEQ ID NO: 101; and a light chain comprising the amino acid sequence of SEQ ID NO: 89;
[0058] (viii) a heavy chain comprising the amino acid sequence of SEQ ID NO: 102; and a light chain comprising the amino acid sequence of SEQ ID NO: 93;
[0059] (ix) a heavy chain comprising the amino acid sequence of SEQ ID NO: 103; and a light chain comprising the amino acid sequence of SEQ ID NO: 95; or
[0060] (x) a heavy chain comprising the amino acid sequence of SEQ ID NO: 102; and a light chain comprising the amino acid sequence of SEQ ID NO: 95.

[0061] In some embodiments, the anti-TfR1 antibody does not specifically bind to the transferrin binding site of the transferrin receptor 1 and/or the anti-TfR1 antibody does not inhibit binding of transferrin to the transferrin receptor 1.

[0062] In some embodiments, the oligonucleotide comprises a region of complementarity to at least 4 consecutive nucleotides of a splicing feature of the DMD pre-mRNA.

[0063] In some embodiments, the splicing feature is an exonic splicing enhancer (ESE) in exon 45 of the DMD pre-mRNA, optionally wherein the ESE comprises a sequence of any one of SEQ ID NOs: 885-912.

[0064] In some embodiments, the splicing feature is a branch point, a splice donor site, or a splice acceptor site, optionally wherein the splicing feature is across the junction of exon 44 and intron 44, in intron 44, across the junction of intron 44 and exon 45, across the junction of exon 45 and intron 45, in intron 45, or across the junction of intron 45 and exon 46 of the DMD pre-mRNA, and further optionally wherein the splicing feature comprises a sequence of any one of SEQ ID NOs: 880-884 and 913-916.

[0065] In some embodiments, the oligonucleotide comprises a sequence complementary to any one of SEQ ID NOs: 160-399 or comprises a sequence of any one of SEQ ID NOs: 400-879, wherein each thymine base (T) may independently and optionally be replaced with a uracil base (U), and each U may independently and optionally be replaced with a T.

[0066] In some embodiments, the oligonucleotide comprises a sequence of any one of SEQ ID NOs: 720, 712, 760, 691, 677, 692, 688, 697, 693, and 675, wherein each thymine base (T) may independently and optionally be replaced with a uracil base (U), and each U may independently and optionally be replaced with a T.

[0067] In some embodiments, the oligonucleotide comprises one or more phosphorodiamidate morpholinos, optionally wherein the oligonucleotide is a phosphorodiamidate morpholino oligomer (PMO).

[0068] In some embodiments, the anti-TfR1 antibody is covalently linked to the molecular payload via a cleavable linker, optionally wherein the cleavable linker comprises a valine-citrulline sequence.

[0069] In some embodiments, the anti-TfR1 antibody is covalently linked to the molecular payload via conjugation to a lysine residue or a cysteine residue of the antibody.

[0070] According to some aspects, oligonucleotides that target DMD are provided herein, wherein the oligonucleotide comprises a region of complementarity to any one of SEQ ID NOs: 160-399, optionally wherein the region of complementarity comprises at least 15 consecutive nucleosides complementary to any one of SEQ ID NOs: 160-399.

[0071] In some embodiments, the oligonucleotide comprises at least 15 consecutive nucleosides of any one of SEQ ID NOs: 400-879, optionally wherein the oligonucleotide comprises a sequence of any one of SEQ ID NOs: 400-879, wherein each thymine base (T) may independently and optionally be replaced with a uracil base (U), and each U may independently and optionally be replaced with a T.

[0072] According to some aspects, methods of delivering an oligonucleotide to a cell are provided herein, the method comprising contacting the cell with a complex disclosed herein or with an oligonucleotide disclosed herein.

[0073] According to some aspects, methods of promoting the expression or activity of a dystrophin protein in a cell are provided herein, the method comprising contacting the cell with a complex disclosed herein or with an oligonucleotide disclosed herein in an amount effective for promoting internalization of the oligonucleotide to the cell, optionally wherein the cell is a muscle cell.

[0074] In some embodiments, the cell comprises a DMD gene that is amenable to skipping of exon 45.

[0075] In some embodiments, the dystrophin protein is a truncated dystrophin protein.

### BRIEF DESCRIPTION OF THE DRAWINGS

[0076] FIG. 1 shows data illustrating that conjugates containing anti-TfR1 Fab (3M12 VH4/VK3) conjugated to a DMD exon-skipping oligonucleotide resulted in enhanced exon skipping compared to the naked DMD exon skipping oligo in Duchenne muscular dystrophy patient myotubes.

### DETAILED DESCRIPTION OF INVENTION

[0077] Aspects of the disclosure relate to a recognition that while certain molecular payloads (e.g., oligonucleotides, peptides, small molecules) can have beneficial effects in muscle cells, it has proven challenging to effectively target such cells. Accordingly, as described herein, the present disclosure provides complexes comprising muscle-targeting agents covalently linked to molecular payloads in order to overcome such challenges. In some embodiments, the complexes are particularly useful for delivering molecular payloads that modulate (e.g., promote) the expression or activity of dystrophin protein (e.g., a truncated dystrophin protein) or DMD (e.g., a mutated DMD allele). In some embodiments, complexes provided herein may comprise oligonucleotides that promote expression and activity of dystrophin protein or DMD, such as by facilitating in-frame exon skipping and/or suppression of premature stop codons. For example, complexes may comprise oligonucleotides that induce skipping of exon(s) of DMD RNA (e.g., pre-mRNA), such as oligonucleotides that induce skipping of exon 45. In some embodiments, synthetic nucleic acid payloads (e.g., DNA or RNA payloads) may be used that express one or more proteins that promote normal expression and activity of dystrophin protein or DMD.

[0078] Duchenne muscular dystrophy is an X-linked muscular disorder caused by one or more mutations in the DMD gene located on Xp21. Dystrophin protein typically forms the dystrophin-associated glycoprotein complex (DGC) at the sarcolemma, which links the muscle sarcomeric structure to the extracellular matrix and protects the sarcolemma from contraction-induced injury. In patients with Duchenne muscular dystrophy, the dystrophin protein is generally absent and muscle fibers typically become damaged due to mechanical overextension. Mutations in the DMD gene are associated with two types of muscular dystrophy, Duchenne muscular dystrophy and Becker muscular dystrophy, depending on whether the translational reading frame is lost or maintained. Becker muscular dystrophy is a clinically milder form of Duchenne muscular dystrophy, and is characterized by features similar to Duchenne muscular dystrophy. In some embodiments, exon skipping induced by oligonucleotides (e.g., delivered using complexes provided herein) can be used to restore the reading frame of a mutated DMD allele resulting in production of a truncated dystrophin protein that is sufficiently functional to improve muscle function. In some embodiments, such exon skipping could converts a Duchenne muscular dystrophy phenotype into a milder Becker muscular dystrophy phenotype.

[0079] Further aspects of the disclosure, including a description of defined terms, are provided below.

### I. Definitions

[0080] Administering: As used herein, the terms “administering” or “administration” means to provide a complex to a subject in a manner that is physiologically and/or (e.g., and) pharmacologically useful (e.g., to treat a condition in the subject).

[0081] Approximately: As used herein, the term “approximately” or “about,” as applied to one or more values of interest, refers to a value that is similar to a stated reference value. In certain embodiments, the term “approximately” or “about” refers to a range of values that fall within 15%, 14%, 13%, 12%, 11%, 10%, 9%, 8%, 7%, 6%, 5%, 4%, 3%, 2%, 1%, or less in either direction (greater than or less than) of the stated reference value unless otherwise stated or otherwise evident from the context (except where such number would exceed 100% of a possible value).

[0082] Antibody: As used herein, the term “antibody” refers to a polypeptide that includes at least one immunoglobulin variable domain or at least one antigenic determinant, e.g., paratope that specifically binds to an antigen. In some embodiments, an antibody is a full-length antibody. In some embodiments, an antibody is a chimeric antibody. In some embodiments, an antibody is a humanized antibody. However, in some embodiments, an antibody is a Fab fragment, a Fab′ fragment, a F(ab′)2 fragment, a Fv fragment or a scFv fragment. In some embodiments, an antibody is a nanobody derived from a camelid antibody or a nanobody derived from shark antibody. In some embodiments, an antibody is a diabody. In some embodiments, an antibody comprises a framework having a human germline sequence. In another embodiment, an antibody comprises a heavy chain constant domain selected from the group consisting of IgG, IgG1, IgG2, IgG2A, IgG2B, IgG2C, IgG3, IgG4, IgA1, IgA2, IgD, IgM, and IgE constant domains. In some embodiments, an antibody comprises a heavy (H) chain variable region (abbreviated herein as VH), and/or (e.g., and) a light (L) chain variable region (abbreviated herein as VL). In some embodiments, an antibody comprises a constant domain, e.g., an Fc region. An immunoglobulin constant domain refers to a heavy or light chain constant domain. Human IgG heavy chain and light chain constant domain amino acid sequences and their functional variations are known. With respect to the heavy chain, in some embodiments, the heavy chain of an antibody described herein can be an alpha (α), delta (Δ), epsilon (ε), gamma (γ) or mu (μ) heavy chain. In some embodiments, the heavy chain of an antibody described herein can comprise a human alpha (α), delta (Δ), epsilon (€), gamma (γ) or mu (μ) heavy chain. In a particular embodiment, an antibody described herein comprises a human gamma 1 CH1, CH2, and/or (e.g., and) CH3 domain. In some embodiments, the amino acid sequence of the VH domain comprises the amino acid sequence of a human gamma (Y) heavy chain constant region, such as any known in the art. Non-limiting examples of human constant region sequences have been described in the art, e.g., see U.S. Pat. No. 5,693,780 and Kabat E A et al., (1991) supra. In some embodiments, the VH domain comprises an amino acid sequence that is at least 70%, 75%, 80%, 85%, 90%, 95%, 98%, or at least 99% identical to any of the variable chain constant regions provided herein. In some embodiments, an antibody is modified, e.g., modified via glycosylation, phosphorylation, sumoylation, and/or (e.g., and) methylation. In some embodiments, an antibody is a glycosylated antibody, which is conjugated to one or more sugar or carbohydrate molecules. In some embodiments, the one or more sugar or carbohydrate molecule are conjugated to the antibody via N-glycosylation, O-glycosylation, C-glycosylation, glypiation (GPI anchor attachment), and/or (e.g., and) phosphoglycosylation. In some embodiments, the one or more sugar or carbohydrate molecule are monosaccharides, disaccharides, oligosaccharides, or glycans. In some embodiments, the one or more sugar or carbohydrate molecule is a branched oligosaccharide or a branched glycan. In some embodiments, the one or more sugar or carbohydrate molecule includes a mannose unit, a glucose unit, an N-acetylglucosamine unit, an N-acetylgalactosamine unit, a galactose unit, a fucose unit, or a phospholipid unit. In some embodiments, an antibody is a construct that comprises a polypeptide comprising one or more antigen binding fragments of the disclosure linked to a linker polypeptide or an immunoglobulin constant domain. Linker polypeptides comprise two or more amino acid residues joined by peptide bonds and are used to link one or more antigen binding portions. Examples of linker polypeptides have been reported (see e.g., Holliger, P., et al. (1993) Proc. Natl. Acad. Sci. USA 90:6444-6448; Poljak, R. J., et al. (1994) Structure 2:1121-1123). Still further, an antibody may be part of a larger immunoadhesion molecule, formed by covalent or noncovalent association of the antibody or antibody portion with one or more other proteins or peptides. Examples of such immunoadhesion molecules include use of the streptavidin core region to make a tetrameric scFv molecule (Kipriyanov, S. M., et al. (1995) Human Antibodies and Hybridomas 6:93-101) and use of a cysteine residue, a marker peptide and a C-terminal polyhistidine tag to make bivalent and biotinylated scFv molecules (Kipriyanov, S. M., et al. (1994) Mol. Immunol. 31:1047-1058).

[0083] Branch point: As used herein, the term “branch point” or “branch site” refers to a nucleic acid sequence motif within an intron of a gene or pre-mRNA that is involved in splicing of pre-mRNA into mRNA (i.e., removing introns from the pre-mRNA), and can be referred to as a splicing feature. A branch point is typically located 18 to 40 nucleotides from the 3′ end of an intron, and contains an adenine but is otherwise relatively unrestricted in sequence. Common sequence motifs for branch points are YNYYRAY, YTRAC, and YNYTRAY, where Y is a pyrimidine, N is any nucleotide. R is any purine, and A is adenine. During splicing, the pre-mRNA is cleaved at the 5′ end of the intron, which then attaches to the branch point region downstream through transesterification bonding between guanines and adenines from the 5′ end and the branch point, respectively, to form a looped lariat structure.

[0084] CDR: As used herein, the term “CDR” refers to the complementarity determining region within antibody variable sequences. A typical antibody molecule comprises a heavy chain variable region (VH) and a light chain variable region (VL), which are usually involved in antigen binding. The VH and VL regions can be further subdivided into regions of hypervariability, also known as “complementarity determining regions” (“CDR”), interspersed with regions that are more conserved, which are known as “framework regions” (“FR”). Each VH and VL is typically composed of three CDRs and four FRs, arranged from amino-terminus to carboxy-terminus in the following order: FR1, CDR1, FR2, CDR2, FR3, CDR3, FR4. The extent of the framework region and CDRs can be precisely identified using methodology known in the art, for example, by the Kabat definition, the IMGT definition, the Chothia definition, the AbM definition, and/or (e.g., and) the contact definition, all of which are well known in the art. Sec. e.g., Kabat. E. A., et al. (1991) Sequences of Proteins of Immunological Interest, Fifth Edition, U.S. Department of Health and Human Services, NIH Publication No. 91-3242; IMGT®, the international ImMunoGeneTics information System® www.imgt.org. Lefranc, M.-P. et al., Nucleic Acids Res., 27:209-212 (1999); Ruiz, M. et al., Nucleic Acids Res., 28:219-221 (2000); Lefranc, M.-P., Nucleic Acids Res., 29:207-209 (2001); Lefranc, M.-P., Nucleic Acids Res., 31:307-310 (2003); Lefranc, M.-P. et al., In Silico Biol., 5, 0006 (2004) [Epub], 5:45-60 (2005); Lefranc, M.-P. et al., Nucleic Acids Res., 33:D593-597 (2005); Lefranc, M.-P. et al., Nucleic Acids Res., 37:D1006-1012 (2009); Lefranc, M.-P. et al., Nucleic Acids Res., 43:D413-422 (2015); Chothia et al., (1989) Nature 342:877; Chothia, C. et al. (1987) J. Mol. Biol. 196:901-917. Al-lazikani et al (1997) J. Molec. Biol. 273:927-948; and Almagro, J. Mol. Recognit. 17:132-143 (2004). See also bioinf.org.uk/abs. As used herein, a CDR may refer to the CDR defined by any method known in the art. Two antibodies having the same CDR means that the two antibodies have the same amino acid sequence of that CDR as determined by the same method, for example, the IMGT definition.

[0085] There are three CDRs in each of the variable regions of the heavy chain and the light chain, which are designated CDR1, CDR2 and CDR3, for each of the variable regions. The term “CDR set” as used herein refers to a group of three CDRs that occur in a single variable region capable of binding the antigen. The exact boundaries of these CDRs have been defined differently according to different systems. The system described by Kabat (Kabat et al., Sequences of Proteins of Immunological Interest (National Institutes of Health, Bethesda, Md. (1987) and (1991)) not only provides an unambiguous residue numbering system applicable to any variable region of an antibody, but also provides precise residue boundaries defining the three CDRs. These CDRs may be referred to as Kabat CDRs. Sub-portions of CDRs may be designated as L1, L2 and L3 or H1, H2 and H3 where the “L” and the “H” designates the light chain and the heavy chains regions, respectively. These regions may be referred to as Chothia CDRs, which have boundaries that overlap with Kabat CDRs. Other boundaries defining CDRs overlapping with the Kabat CDRs have been described by Padlan (FASEB J. 9:133-139 (1995)) and MacCallum (J Mol Biol 262(5):732-45 (1996)). Still other CDR boundary definitions may not strictly follow one of the above systems, but will nonetheless overlap with the Kabat CDRs, although they may be shortened or lengthened in light of prediction or experimental findings that particular residues or groups of residues or even entire CDRs do not significantly impact antigen binding. The methods used herein may utilize CDRs defined according to any of these systems. Examples of CDR definition systems are provided in Table 1.

TABLE 1
CDR Definitions

| | IMGT¹ | Kabat² | Chothia³ |
|---|---|---|---|
| CDR-H1 | 27-38 | 31-35 | 26-32 |
| CDR-H2 | 56-65 | 50-65 | 53-55 |
| CDR-H3 | 105-116/117 | 95-102 | 96-101 |
| CDR-L1 | 27-38 | 24-34 | 26-32 |
| CDR-L2 | 56-65 | 50-56 | 50-52 |
| CDR-L3 | 105-116/117 | 89-97 | 91-96 |

¹IMGT ®, the international ImMunoGeneTics information system ®, imgt.org, Lefranc, M.-P. et al., Nucleic Acids Res., 27: 209-212 (1999)
²Kabat et al. (1991) Sequences of Proteins of Immunological Interest, Fifth Edition, U.S. Department of Health and Human Services, NIH Publication No. 91-3242
³Chothia et al., J. Mol. Biol. 196: 901-917 (1987))

[0086] CDR-grafted antibody: The term “CDR-grafted antibody” refers to antibodies which comprise heavy and light chain variable region sequences from one species but in which the sequences of one or more of the CDR regions of VH and/or (e.g., and) VL are replaced with CDR sequences of another species, such as antibodies having murine heavy and light chain variable regions in which one or more of the murine CDRs (e.g., CDR3) has been replaced with human CDR sequences.

[0087] Chimeric antibody: The term “chimeric antibody” refers to antibodies which comprise heavy and light chain variable region sequences from one species and constant region sequences from another species, such as antibodies having murine heavy and light chain variable regions linked to human constant regions.

[0088] Complementary: As used herein, the term “complementary” refers to the capacity for precise pairing between two nucleosides or two sets of nucleosides. In particular, complementary is a term that characterizes an extent of hydrogen bond pairing that brings about binding between two nucleosides or two sets of nucleosides. For example, if a base at one position of an oligonucleotide is capable of hydrogen bonding with a base at the corresponding position of a target nucleic acid (e.g., an mRNA), then the bases are considered to be complementary to each other at that position. Base pairings may include both canonical Watson-Crick base pairing and non-Watson-Crick base pairing (e.g., Wobble base pairing and Hoogsteen base pairing). For example, in some embodiments, for complementary base pairings, adenosine-type bases (A) are complementary to thymidine-type bases (T) or uracil-type bases (U), that cytosine-type bases (C) are complementary to guanosine-type bases (G), and that universal bases such as 3-nitropyrrole or 5-nitroindole can hybridize to and are considered complementary to any A. C. U. or T. Inosine (I) has also been considered in the art to be a universal base and is considered complementary to any A. C. U or T.

[0089] Conservative amino acid substitution: As used herein, a “conservative amino acid substitution” refers to an amino acid substitution that does not alter the relative charge or size characteristics of the protein in which the amino acid substitution is made. Variants can be prepared according to methods for altering polypeptide sequence known to one of ordinary skill in the art such as are found in references which compile such methods, e.g. Molecular Cloning: A Laboratory Manual, J. Sambrook, et al., eds., Fourth Edition, Cold Spring Harbor Laboratory Press, Cold Spring Harbor, New York, 2012, or Current Protocols in Molecular Biology, F. M. Ausubel, et al., eds., John Wiley & Sons, Inc., New York. Conservative substitutions of amino acids include substitutions made amongst amino acids within the following groups: (a) M, I, L, V; (b) F, Y, W; (c) K, R, H; (d) A, G; (c) S, T; (f) Q, N; and (g) E, D.

[0090] Covalently linked: As used herein, the term “covalently linked” refers to a characteristic of two or more molecules being linked together via at least one covalent bond. In some embodiments, two molecules can be covalently linked together by a single bond, e.g., a disulfide bond or disulfide bridge, that serves as a linker between the molecules. However, in some embodiments, two or more molecules can be covalently linked together via a molecule that serves as a linker that joins the two or more molecules together through multiple covalent bonds. In some embodiments, a linker may be a cleavable linker. However, in some embodiments, a linker may be a non-cleavable linker.

[0091] Cross-reactive: As used herein and in the context of a targeting agent (e.g., antibody), the term “cross-reactive,” refers to a property of the agent being capable of specifically binding to more than one antigen of a similar type or class (e.g., antigens of multiple homologs, paralogs, or orthologs) with similar affinity or avidity. For example, in some embodiments, an antibody that is cross-reactive against human and non-human primate antigens of a similar type or class (e.g., a human transferrin receptor and non-human primate transferrin receptor) is capable of binding to the human antigen and non-human primate antigens with a similar affinity or avidity. In some embodiments, an antibody is cross-reactive against a human antigen and a rodent antigen of a similar type or class. In some embodiments, an antibody is cross-reactive against a rodent antigen and a non-human primate antigen of a similar type or class. In some embodiments, an antibody is cross-reactive against a human antigen, a non-human primate antigen, and a rodent antigen of a similar type or class.

[0092] DMD: As used herein, the term “DMD” refers to a gene that encodes dystrophin protein, a key component of the dystrophin-glycoprotein complex, which bridges the inner cytoskeleton and the extracellular matrix in muscle cells, particularly muscle fibers. Deletions, duplications, and point mutations in DMD may cause dystrophinopathies, such as Duchenne muscular dystrophy, Becker muscular dystrophy, or cardiomyopathy. Alternative promoter usage and alternative splicing result in numerous distinct transcript variants and protein isoforms for this gene. In some embodiments, a dystrophin gene (DMD or DMD gene) may be a human (Gene ID: 1756), non-human primate (e.g., Gene ID: 465559), or rodent gene (e.g., Gene ID: 13405; Gene ID: 24907). In addition, multiple human transcript variants (e.g., as annotated under GenBank RefSeq Accession Numbers: NM_000109.3, NM_004006.2, NM_004009.3, NM_004010.3 and NM_004011.3) have been characterized that encode different protein isoforms.

[0093] DMD allele: As used herein, the term “DMD allele” refers to any one of alternative forms (e.g., wild-type or mutant forms) of a DMD gene. In some embodiments, a DMD allele may encode for dystrophin that retains its normal and typical functions. In some embodiments, a DMD allele may comprise one or more mutations that results in muscular dystrophy. Common mutations that lead to Duchenne muscular dystrophy involve frameshift, deletion, substitution, and duplicative mutations of one or more of 79 exons present in a dystrophin allele, e.g., exon 8, exon 23, exon 41, exon 44, exon 45, exon 50, exon 51, exon 52, exon 53, or exon 55. Further examples of DMD mutations are disclosed, for example, in Flanigan K M, et al., Mutational spectrum of DMD mutations in dystrophinopathy patients: application of modern diagnostic techniques to a large cohort. Hum Mutat. 2009 December; 30 (12):1657-66, the contents of which are incorporated herein by reference in its entirety.

[0094] Dystrophinopathy: As used herein, the term “dystrophinopathy” refers to a muscle disease results from one or more mutated DMD alleles. Dystrophinopathies include a spectrum of conditions (ranging from mild to severe) that includes Duchenne muscular dystrophy, Becker muscular dystrophy, and DMD-associated dilated cardiomyopathy (DCM). In some embodiments, at one end of the spectrum, dystrophinopathy is phenotypically associated with an asymptomatic increase in serum concentration of creatine phosphokinase (CK) and/or (e.g., and) muscle cramps with myoglobinuria. In some embodiments, at the other end of the spectrum, dystrophinopathy is phenotypically associated with progressive muscle diseases that are generally classified as Duchenne or Becker muscular dystrophy when skeletal muscle is primarily affected and as DMD-associated dilated cardiomyopathy (DCM) when the heart is primarily affected. Symptoms of Duchenne muscular dystrophy include muscle loss or degeneration, diminished muscle function, pseudohypertrophy of the tongue and calf muscles, higher risk of neurological abnormalities, and a shortened lifespan. Duchenne muscular dystrophy is associated with Online Mendelian Inheritance in Man (OMIM) Entry #310200. Becker muscular dystrophy is associated with OMIM Entry #300376. Dilated cardiomyopathy is associated with OMIM Entry X #302045.

[0095] Exonic splicing enhancer (ESE): As used herein, the term “exonic splicing enhancer” or “ESE” refers to a nucleic acid sequence motif within an exon of a gene, pre-mRNA, or mRNA that directs or enhances splicing of pre-mRNA into mRNA, e.g., as described in Blencowe et al., Trends Biochem Sci 25, 106-10. (2000), incorporated herein by reference. ESEs can be referred to as splicing features. ESEs may direct or enhance splicing, for example, to remove one or more introns and/or one or more exons from a gene transcript. ESE motifs are typically 6-8 nucleobases in length. SR proteins (e.g., proteins encoded by the gene SRSF1, SRSF2, SRSF3, SRSF4, SRSF5, SRSF6, SRSF7, SRSF8, SRSF9, SRSF10, SRSF11, SRSF12, TRA2A or TRA2B) bind to ESEs through their RNA recognition motif region to facilitate splicing. ESE motifs can be identified through a number of methods, including those described in Cartegni et al., Nucleic Acids Research, 2003, Vol. 31, No. 13, 3568-3571, incorporated herein by reference.

[0096] Framework: As used herein, the term “framework” or “framework sequence” refers to the remaining sequences of a variable region minus the CDRs. Because the exact definition of a CDR sequence can be determined by different systems, the meaning of a framework sequence is subject to correspondingly different interpretations. The six CDRs (CDR-L1, CDR-L2, and CDR-L3 of light chain and CDR-H1, CDR-H2, and CDR-H3 of heavy chain) also divide the framework regions on the light chain and the heavy chain into four sub-regions (FR1, FR2, FR3 and FR4) on each chain, in which CDR1 is positioned between FR1 and FR2, CDR2 between FR2 and FR3, and CDR3 between FR3 and FR4. Without specifying the particular sub-regions as FR1, FR2, FR3 or FR4, a framework region, as referred by others, represents the combined FRs within the variable region of a single, naturally occurring immunoglobulin chain. As used herein, a FR represents one of the four sub-regions, and FRs represents two or more of the four sub-regions constituting a framework region. Human heavy chain and light chain acceptor sequences are known in the art. In one embodiment, the acceptor sequences known in the art may be used in the antibodies disclosed herein.

[0097] Human antibody: The term “human antibody”, as used herein, is intended to include antibodies having variable and constant regions derived from human germline immunoglobulin sequences. The human antibodies of the disclosure may include amino acid residues not encoded by human germline immunoglobulin sequences (e.g., mutations introduced by random or site-specific mutagenesis in vitro or by somatic mutation in vivo), for example in the CDRs and in particular CDR3. However, the term “human antibody”, as used herein, is not intended to include antibodies in which CDR sequences derived from the germline of another mammalian species, such as a mouse, have been grafted onto human framework sequences.

[0098] Humanized antibody: The term “humanized antibody” refers to antibodies which comprise heavy and light chain variable region sequences from a non-human species (e.g., a mouse) but in which at least a portion of the VH and/or (e.g., and) VL sequence has been altered to be more “human-like”, i.e., more similar to human germline variable sequences. One type of humanized antibody is a CDR-grafted antibody, in which human CDR sequences are introduced into non-human VH and VL sequences to replace the corresponding non-human CDR sequences. In one embodiment, humanized anti-TfR1 antibodies and antigen binding portions are provided. Such antibodies may be generated by obtaining murine anti-TfR1 monoclonal antibodies using traditional hybridoma technology followed by humanization using in vitro genetic engineering, such as those disclosed in Kasaian et al PCT publication No. WO 2005/123126 A2.

[0099] Internalizing cell surface receptor: As used herein, the term, “internalizing cell surface receptor” refers to a cell surface receptor that is internalized by cells, e.g., upon external stimulation, e.g., ligand binding to the receptor. In some embodiments, an internalizing cell surface receptor is internalized by endocytosis. In some embodiments, an internalizing cell surface receptor is internalized by clathrin-mediated endocytosis. However, in some embodiments, an internalizing cell surface receptor is internalized by a clathrin-independent pathway, such as, for example, phagocytosis, macropinocytosis, caveolae- and raft-mediated uptake or constitutive clathrin-independent endocytosis. In some embodiments, the internalizing cell surface receptor comprises an intracellular domain, a transmembrane domain, and/or (e.g., and) an extracellular domain, which may optionally further comprise a ligand-binding domain. In some embodiments, a cell surface receptor becomes internalized by a cell after ligand binding. In some embodiments, a ligand may be a muscle-targeting agent or a muscle-targeting antibody. In some embodiments, an internalizing cell surface receptor is a transferrin receptor.

[0100] Isolated antibody: An “isolated antibody”, as used herein, is intended to refer to an antibody that is substantially free of other antibodies having different antigenic specificities (e.g., an isolated antibody that specifically binds transferrin receptor is substantially free of antibodies that specifically bind antigens other than transferrin receptor). An isolated antibody that specifically binds transferrin receptor complex may, however, have cross-reactivity to other antigens, such as transferrin receptor molecules from other species. Moreover, an isolated antibody may be substantially free of other cellular material and/or (e.g., and) chemicals.

[0101] Kabat numbering: The terms “Kabat numbering”, “Kabat definitions and “Kabat labeling” are used interchangeably herein. These terms, which are recognized in the art, refer to a system of numbering amino acid residues which are more variable (i.e. hypervariable) than other amino acid residues in the heavy and light chain variable regions of an antibody, or an antigen binding portion thereof (Kabat et al. (1971) Ann. NY Acad. Sci. 190:382-391 and, Kabat, E. A., et al. (1991) Sequences of Proteins of Immunological Interest, Fifth Edition, U.S. Department of Health and Human Services, NIH Publication No. 91-3242). For the heavy chain variable region, the hypervariable region ranges from amino acid positions 31 to 35 for CDR1, amino acid positions 50 to 65 for CDR2, and amino acid positions 95 to 102 for CDR3. For the light chain variable region, the hypervariable region ranges from amino acid positions 24 to 34 for CDR1, amino acid positions 50 to 56 for CDR2, and amino acid positions 89 to 97 for CDR3.

[0102] Molecular payload: As used herein, the term “molecular payload” refers to a molecule or species that functions to modulate a biological outcome. In some embodiments, a molecular payload is linked to, or otherwise associated with a muscle-targeting agent. In some embodiments, the molecular payload is a small molecule, a protein, a peptide, a nucleic acid, or an oligonucleotide. In some embodiments, the molecular payload functions to modulate the transcription of a DNA sequence, to modulate the expression of a protein, or to modulate the activity of a protein. In some embodiments, the molecular payload is an oligonucleotide that comprises a strand having a region of complementarity to a target gene.

[0103] Muscle-targeting agent: As used herein, the term, “muscle-targeting agent,” refers to a molecule that specifically binds to an antigen expressed on muscle cells. The antigen in or on muscle cells may be a membrane protein, for example an integral membrane protein or a peripheral membrane protein. Typically, a muscle-targeting agent specifically binds to an antigen on muscle cells that facilitates internalization of the muscle-targeting agent (and any associated molecular payload) into the muscle cells. In some embodiments, a muscle-targeting agent specifically binds to an internalizing, cell surface receptor on muscles and is capable of being internalized into muscle cells through receptor mediated internalization. In some embodiments, the muscle-targeting agent is a small molecule, a protein, a peptide, a nucleic acid (e.g., an aptamer), or an antibody. In some embodiments, the muscle-targeting agent is linked to a molecular payload.

[0104] Muscle-targeting antibody: As used herein, the term, “muscle-targeting antibody.” refers to a muscle-targeting agent that is an antibody that specifically binds to an antigen found in or on muscle cells. In some embodiments, a muscle-targeting antibody specifically binds to an antigen on muscle cells that facilitates internalization of the muscle-targeting antibody (and any associated molecular payment) into the muscle cells. In some embodiments, the muscle-targeting antibody specifically binds to an internalizing, cell surface receptor present on muscle cells. In some embodiments, the muscle-targeting antibody is an antibody that specifically binds to a transferrin receptor.

[0105] Oligonucleotide: As used herein, the term “oligonucleotide” refers to an oligomeric nucleic acid compound of up to 200 nucleotides in length. Examples of oligonucleotides include, but are not limited to, RNAi oligonucleotides (e.g., siRNAs, shRNAs), microRNAs, gapmers, mixmers, phosphorodiamidate morpholinos, peptide nucleic acids, aptamers, guide nucleic acids (e.g., Cas9 guide RNAs), etc. Oligonucleotides may be single-stranded or double-stranded. In some embodiments, an oligonucleotide may comprise one or more modified nucleosides (e.g., 2′-O-methyl sugar modifications, purine or pyrimidine modifications). In some embodiments, an oligonucleotide may comprise one or more modified internucleoside linkages. In some embodiments, an oligonucleotide may comprise one or more phosphorothioate linkages, which may be in the Rp or Sp stereochemical conformation.

[0106] Recombinant antibody: The term “recombinant human antibody”, as used herein, is intended to include all human antibodies that are prepared, expressed, created or isolated by recombinant means, such as antibodies expressed using a recombinant expression vector transfected into a host cell (described in more details in this disclosure), antibodies isolated from a recombinant, combinatorial human antibody library (Hoogenboom H. R., (1997) TIB Tech. 15:62-70; Azzazy H., and Highsmith W. E., (2002) Clin. Biochem. 35:425-445; Gavilondo J. V., and Larrick J. W. (2002) BioTechniques 29:128-145; Hoogenboom H., and Chames P. (2000) Immunology Today 21:371-378), antibodies isolated from an animal (e.g., a mouse) that is transgenic for human immunoglobulin genes (see e.g., Taylor, L. D., et al. (1992) Nucl. Acids Res. 20:6287-6295; Kellermann S-A., and Green L. L. (2002) Current Opinion in Biotechnology 13:593-597; Little M. et al (2000) Immunology Today 21:364-370) or antibodies prepared, expressed, created or isolated by any other means that involves splicing of human immunoglobulin gene sequences to other DNA sequences. Such recombinant human antibodies have variable and constant regions derived from human germline immunoglobulin sequences. In certain embodiments, however, such recombinant human antibodies are subjected to in vitro mutagenesis (or, when an animal transgenic for human Ig sequences is used, in vivo somatic mutagenesis) and thus the amino acid sequences of the VH and VL regions of the recombinant antibodies are sequences that, while derived from and related to human germline VH and VL sequences, may not naturally exist within the human antibody germline repertoire in vivo. One embodiment of the disclosure provides fully human antibodies capable of binding human transferrin receptor which can be generated using techniques well known in the art, such as, but not limited to, using human Ig phage libraries such as those disclosed in Jermutus et al., PCT publication No. WO 2005/007699 A2.

[0107] Region of complementarity: As used herein, the term “region of complementarity” refers to a nucleotide sequence, e.g., of an oligonucleotide, that is sufficiently complementary to a cognate nucleotide sequence, e.g., of a target nucleic acid, such that the two nucleotide sequences are capable of annealing to one another under physiological conditions (e.g., in a cell). In some embodiments, a region of complementarity is fully complementary to a cognate nucleotide sequence of target nucleic acid. However, in some embodiments, a region of complementarity is partially complementary to a cognate nucleotide sequence of target nucleic acid (e.g., at least 80%, 90%, 95% or 99% complementarity). In some embodiments, a region of complementarity contains 1, 2, 3, or 4 mismatches compared with a cognate nucleotide sequence of a target nucleic acid.

[0108] Specifically binds: As used herein, the term “specifically binds” refers to the ability of a molecule to bind to a binding partner with a degree of affinity or avidity that enables the molecule to be used to distinguish the binding partner from an appropriate control in a binding assay or other binding context. With respect to an antibody, the term, “specifically binds”, refers to the ability of the antibody to bind to a specific antigen with a degree of affinity or avidity, compared with an appropriate reference antigen or antigens, that enables the antibody to be used to distinguish the specific antigen from others, e.g., to an extent that permits preferential targeting to certain cells, e.g., muscle cells, through binding to the antigen, as described herein. In some embodiments, an antibody specifically binds to a target if the antibody has a K_{D} for binding the target of at least about 10⁻⁴ M, 10⁻⁵ M, 10⁻⁶ M, 10⁻⁷ M. 10⁻⁸ M, 10⁻⁹ M. 10⁻¹⁰ M, 10⁻¹¹ M, 10⁻¹² M. 10⁻¹³ M, or less. In some embodiments, an antibody specifically binds to the transferrin receptor, e.g., an epitope of the apical domain of transferrin receptor.

[0109] Splice acceptor site: As used herein, the term “splice acceptor site” or “splice acceptor” refers to a nucleic acid sequence motif at the 3′ end of an intron or across an intron/exon junction of a gene or pre-mRNA that is involved in splicing of pre-mRNA into mRNA (i.e., removing introns from the pre-mRNA), and can be referred to as a splicing feature. A splice acceptor site includes a terminal AG sequence at the 3′ end of an intron, which is typically preceded (5′-ward) by a region high in pyrimidines (C/U). Upstream from the splice acceptor site is the branch point. Formation of a lariat loop intermediate structure by a transesterification reaction between the branch point and the splice donor site releases a 3′-OH of the 5′ exon, which subsequently reacts with the first nucleotide of the 3′ exon, thereby joining the exons and releasing the intron lariat. The AG sequence at the 3′ end of the intron in the splice acceptor site is known to be critical for proper splicing, as changing one of these nucleotides results in inhibition of splicing. Rarely, alternative splice acceptor sites have an AC at the 3′ end of the intron, instead of the more common AG. A common splice acceptor site motif has a sequence of or similar to [Y-rich region]-NCAGG or YₓNYAGG, in which Y represents a pyrimidine, N represents any nucleotide, and x is a number from 4 to 20. The cut site follows the AG, which represent the 3′-terminal nucleotides of the excised intron.

[0110] Splice donor site: As used herein, the term “splice donor site” or “splice donor” refers to a nucleic acid sequence motif at the 5′ end of an intron or across an exon/intron junction of a gene or pre-mRNA that is involved in splicing of pre-mRNA into mRNA (i.e., removing introns from the pre-mRNA), and can be referred to as a splicing feature. A splice donor site includes a terminal GU sequence at the 5′ end of the intron, within a larger and fairly unconstrained sequence. During splicing, the 2′-OH of a nucleotide within the branch point initiates a transesterification reaction via a nucleophilic attack on the 5′ G of the intron within the splice donor site. The G is thereby cleaved from the pre-mRNA and bonds instead to the branch point nucleotide, forming a loop lariat structure. The 3′ nucleotide of the upstream exon subsequently binds the splice acceptor site, joining the exons and excising the intron. A typical splice donor site has a sequence of or similar to GGGURAGU or AGGURNG, in which R represents a purine and N represents any nucleotide. The cut site precedes the first GU (i.e., GG/GURAGU or AG/GURNG), which represent the 5′-terminal nucleotides of the excised intron.

[0111] Subject: As used herein, the term “subject” refers to a mammal. In some embodiments, a subject is non-human primate, or rodent. In some embodiments, a subject is a human. In some embodiments, a subject is a patient, e.g., a human patient that has or is suspected of having a disease. In some embodiments, the subject is a human patient who has or is suspected of having a disease resulting from a mutated DMD gene sequence, e.g., a mutation in an exon of a DMD gene sequence. In some embodiments, a subject has a dystrophinopathy, e.g., Duchenne muscular dystrophy. In some embodiments, a subject is a patient that has a mutation of the DMD gene that is amenable to exon 45 skipping.

[0112] Transferrin receptor: As used herein, the term, “transferrin receptor” (also known as TFRC, CD71, p90, or TFR1) refers to an internalizing cell surface receptor that binds transferrin to facilitate iron uptake by endocytosis. In some embodiments, a transferrin receptor may be of human (NCBI Gene ID 7037), non-human primate (e.g., NCBI Gene ID 711568 or NCBI Gene ID 102136007), or rodent (e.g., NCBI Gene ID 22042) origin. In addition, multiple human transcript variants have been characterized that encoded different isoforms of the receptor (e.g., as annotated under GenBank RefSeq Accession Numbers: NP_001121620.1, NP_003225.2, NP_001300894.1, and NP_001300895.1).

[0113] 2′-modified nucleoside: As used herein, the terms “2′-modified nucleoside” and “2′-modified ribonucleoside” are used interchangeably and refer to a nucleoside having a sugar moiety modified at the 2′ position. In some embodiments, the 2′-modified nucleoside is a 2′-4′ bicyclic nucleoside, where the 2′ and 4′ positions of the sugar are bridged (e.g., via a methylene, an ethylene, or a (S)-constrained ethyl bridge). In some embodiments, the 2′-modified nucleoside is a non-bicyclic 2′-modified nucleoside, e.g., where the 2′ position of the sugar moiety is substituted. Non-limiting examples of 2′-modified nucleosides include: 2′-deoxy, 2′-fluoro (2′-F), 2′-O-methyl (2′-O-Me), 2′-O-methoxyethyl (2′-MOE), 2′-O-aminopropyl (2′-O-AP), 2′-O-dimethylaminoethyl (2′-O-DMAOE), 2′-O-dimethylaminopropyl (2′-O-DMAP), 2′-O-dimethylaminoethyloxyethyl (2′-O-DMAEOE), 2′-O—N-methylacetamido (2′-O-NMA), locked nucleic acid (LNA, methylene-bridged nucleic acid), ethylene-bridged nucleic acid (ENA), and (S)-constrained ethyl-bridged nucleic acid (cEt). In some embodiments, the 2′-modified nucleosides described herein are high-affinity modified nucleosides and oligonucleotides comprising the 2′-modified nucleosides have increased affinity to a target sequences, relative to an unmodified oligonucleotide. Examples of structures of 2′-modified nucleosides are provided below:

[chemical structure]

These examples are shown with phosphate groups, but any internucleoside linkages are contemplated between 2′-modified nucleosides.

### II. Complexes

[0114] Provided herein are complexes that comprise a targeting agent, e.g. an antibody, covalently linked to a molecular payload. In some embodiments, a complex comprises a muscle-targeting antibody covalently linked to an oligonucleotide. A complex may comprise an antibody that specifically binds a single antigenic site or that binds to at least two antigenic sites that may exist on the same or different antigens.

[0115] A complex may be used to modulate the activity or function of at least one gene, protein, and/or (e.g., and) nucleic acid. In some embodiments, the molecular payload present within a complex is responsible for the modulation of a gene, protein, and/or (e.g., and) nucleic acids. A molecular payload may be a small molecule, protein, nucleic acid, oligonucleotide, or any molecular entity capable of modulating the activity or function of a gene, protein, and/or (e.g., and) nucleic acid in a cell.

[0116] In some embodiments, a complex comprises a muscle-targeting agent, e.g., an anti-transferrin receptor antibody, covalently linked to a molecular payload, e.g., an antisense oligonucleotide that targets DMD to promote exon skipping, e.g., in a transcript encoded from a mutated DMD allele. In some embodiments, the complex targets a DMD pre-mRNA to promote skipping of exon 45 in the DMD pre-mRNA.

### A. Muscle-Targeting Agents

[0117] Some aspects of the disclosure provide muscle-targeting agents, e.g., for delivering a molecular payload to a muscle cell. In some embodiments, such muscle-targeting agents are capable of binding to a muscle cell, e.g., via specifically binding to an antigen on the muscle cell, and delivering an associated molecular payload to the muscle cell. In some embodiments, the molecular payload is bound (e.g., covalently bound) to the muscle targeting agent and is internalized into the muscle cell upon binding of the muscle targeting agent to an antigen on the muscle cell, e.g., via endocytosis. It should be appreciated that various types of muscle-targeting agents may be used in accordance with the disclosure, and that any muscle targets (e.g., muscle surface proteins) can be targeted by any type of muscle-targeting agent described herein. For example, the muscle-targeting agent may comprise, or consist of, a small molecule, a nucleic acid (e.g., DNA or RNA), a peptide (e.g., an antibody), a lipid (e.g., a microvesicle), or a sugar moiety (e.g., a polysaccharide). Exemplary muscle-targeting agents are described in further detail herein, however, it should be appreciated that the exemplary muscle-targeting agents provided herein are not meant to be limiting.

[0118] Some aspects of the disclosure provide muscle-targeting agents that specifically bind to an antigen on muscle, such as skeletal muscle, smooth muscle, or cardiac muscle. In some embodiments, any of the muscle-targeting agents provided herein bind to (e.g., specifically bind to) an antigen on a skeletal muscle cell, a smooth muscle cell, and/or (e.g., and) a cardiac muscle cell.

[0119] By interacting with muscle-specific cell surface recognition elements (e.g., cell membrane proteins), both tissue localization and selective uptake into muscle cells can be achieved. In some embodiments, molecules that are substrates for muscle uptake transporters are useful for delivering a molecular payload into muscle tissue. Binding to muscle surface recognition elements followed by endocytosis can allow even large molecules such as antibodies to enter muscle cells. As another example molecular payloads conjugated to transferrin or anti-TfR1 antibodies can be taken up by muscle cells via binding to transferrin receptor, which may then be endocytosed, e.g., via clathrin-mediated endocytosis.

[0120] The use of muscle-targeting agents may be useful for concentrating a molecular payload (e.g., oligonucleotide) in muscle while reducing toxicity associated with effects in other tissues. In some embodiments, the muscle-targeting agent concentrates a bound molecular payload in muscle cells as compared to another cell type within a subject. In some embodiments, the muscle-targeting agent concentrates a bound molecular payload in muscle cells (e.g., skeletal, smooth, or cardiac muscle cells) in an amount that is at least 1, 2, 3, 4, 5, 6, 7, 8, 9, 10, 15, 20, 30, 40, 50, 60, 70, 80, 90, or 100 times greater than an amount in non-muscle cells (e.g., liver, neuronal, blood, or fat cells). In some embodiments, a toxicity of the molecular payload in a subject is reduced by at least 1%, 2%, 3%, 4%, 5%, 10%, 15%, 20%, 25%, 30%, 35%, 40%, 45%, 50%, 55%, 60%, 65%, 70%, 75%, 80%, 90%, or 95% when it is delivered to the subject when bound to the muscle-targeting agent.

[0121] In some embodiments, to achieve muscle selectivity, a muscle recognition element (e.g., a muscle cell antigen) may be required. As one example, a muscle-targeting agent may be a small molecule that is a substrate for a muscle-specific uptake transporter. As another example, a muscle-targeting agent may be an antibody that enters a muscle cell via transporter-mediated endocytosis. As another example, a muscle targeting agent may be a ligand that binds to cell surface receptor on a muscle cell. It should be appreciated that while transporter-based approaches provide a direct path for cellular entry, receptor-based targeting may involve stimulated endocytosis to reach the desired site of action.

i. Muscle-Targeting Antibodies

[0122] In some embodiments, the muscle-targeting agent is an antibody. Generally, the high specificity of antibodies for their target antigen provides the potential for selectively targeting muscle cells (e.g., skeletal, smooth, and/or (e.g., and) cardiac muscle cells). This specificity may also limit off-target toxicity. Examples of antibodies that are capable of targeting a surface antigen of muscle cells have been reported and are within the scope of the disclosure. For example, antibodies that target the surface of muscle cells are described in Arahata K., et al. “Immunostaining of skeletal and cardiac muscle surface membrane with antibody against Duchenne muscular dystrophy peptide” Nature 1988; 333: 861-3; Song K. S., et al. “Expression of caveolin-3 in skeletal, cardiac, and smooth muscle cells. Cavcolin-3 is a component of the sarcolemma and co-fractionates with dystrophin and dystrophin-associated glycoproteins” J Biol Chem 1996; 271: 15160-5; and Weisbart R. H. et al., “Cell type specific targeted intracellular delivery into muscle of a monoclonal antibody that binds myosin IIb” Mol Immunol. 2003 March, 39(13):78309; the entire contents of each of which are incorporated herein by reference.

### a. Anti-Transferrin Receptor (TfR) Antibodies

[0123] Some aspects of the disclosure are based on the recognition that agents binding to transferrin receptor, e.g., anti-transferrin-receptor antibodies, are capable of targeting muscle cell. Transferrin receptors are internalizing cell surface receptors that transport transferrin across the cellular membrane and participate in the regulation and homeostasis of intracellular iron levels. Some aspects of the disclosure provide transferrin receptor binding proteins, which are capable of binding to transferrin receptor. Accordingly, aspects of the disclosure provide binding proteins (e.g., antibodies) that bind to transferrin receptor. In some embodiments, binding proteins that bind to transferrin receptor are internalized, along with any bound molecular payload, into a muscle cell. As used herein, an antibody that binds to a transferrin receptor may be referred to interchangeably as an, transferrin receptor antibody, an anti-transferrin receptor antibody, or an anti-TfR1 antibody. Antibodies that bind, e.g. specifically bind, to a transferrin receptor may be internalized into the cell, e.g. through receptor-mediated endocytosis, upon binding to a transferrin receptor.

[0124] It should be appreciated that anti-TfR1 antibodies may be produced, synthesized, and/or (e.g., and) derivatized using several known methodologies, e.g. library design using phage display. Exemplary methodologies have been characterized in the art and are incorporated by reference (Díez, P. et al. “High-throughput phage-display screening in array format”, Enzyme and microbial technology, 2015, 79, 34-41; Christoph M. H. and Stanley, J. R. “Antibody Phage Display: Technique and Applications” J Invest Dermatol. 2014, 134:2; Engleman, Edgar (Ed.) “Human Hybridomas and Monoclonal Antibodies.” 1985, Springer). In other embodiments, an anti-TfR1 antibody has been previously characterized or disclosed. Antibodies that specifically bind to transferrin receptor are known in the art (see, e.g. U.S. Pat. No. 4,364,934, filed Dec. 4, 1979, “Monoclonal antibody to a human early thymocyte antigen and methods for preparing same”; U.S. Pat. No. 8,409,573, filed Jun. 14, 2006, “Anti-CD71 monoclonal antibodies and uses thereof for treating malignant tumor cells”; U.S. Pat. No. 9,708,406, filed May 20, 2014, “Anti-transferrin receptor antibodies and methods of use”; U.S. Pat. No. 9,611,323, filed Dec. 19, 2014, “Low affinity blood brain barrier receptor antibodies and uses therefor”; WO 2015/098989, filed Dec. 24, 2014, “Novel anti-Transferrin receptor antibody that passes through blood-brain barrier”; Schneider C. et al. “Structural features of the cell surface receptor for transferrin that is recognized by the monoclonal antibody OKT9.” J Biol Chem. 1982, 257:14, 8516-8522; Lec et al. “Targeting Rat Anti-Mouse Transferrin Receptor Monoclonal Antibodies through Blood-Brain Barrier in Mouse” 2000, J Pharmacol. Exp. Ther., 292: 1048-1052).

[0125] In some embodiments, the anti-TfR1 antibody described herein binds to transferrin receptor with high specificity and affinity. In some embodiments, the anti-TfR1 antibody described herein specifically binds to any extracellular epitope of a transferrin receptor or an epitope that becomes exposed to an antibody. In some embodiments, anti-TfR1 antibodies provided herein bind specifically to transferrin receptor from human, non-human primates, mouse, rat, etc. In some embodiments, anti-TfR1 antibodies provided herein bind to human transferrin receptor. In some embodiments, the anti-TfR1 antibody described herein binds to an amino acid segment of a human or non-human primate transferrin receptor, as provided in SEQ ID NOs: 105-108. In some embodiments, the anti-TfR1 antibody described herein binds to an amino acid segment corresponding to amino acids 90-96 of a human transferrin receptor as set forth in SEQ ID NO: 105, which is not in the apical domain of the transferrin receptor.

[0126] In some embodiments, the anti-TfR1 antibodies described herein (e.g., Anti-TfR clone 8 in Table 2 below) bind an epitope in TfR1, wherein the epitope comprises residues in amino acids 214-241 and/or amino acids 354-381 of SEQ ID NO: 105. In some embodiments, the anti-TfR1 antibodies described herein bind an epitope comprising residues in amino acids 214-241 and amino acids 354-381 of SEQ ID NO: 105. In some embodiments, the anti-TfR1 antibodies described herein bind an epitope comprising one or more of residues Y222, T227, K231, H234, T367, S368, S370, T376, and S378 of human TfR1 as set forth in SEQ ID NO: 105. In some embodiments, the anti-TfR1 antibodies described herein bind an epitope comprising residues Y222, T227, K231, H234, T367, S368, S370, T376, and S378 of human TfR1 as set forth in SEQ ID NO: 105.

[0127] In some embodiments, the anti-TfR1 antibody described herein (e.g., 3M12 in Table 2 below and its variants) bind an epitope in TfR1, wherein the epitope comprises residues in amino acids 258-291 and/or amino acids 358-381 of SEQ ID NO: 105. In some embodiments, the anti-TfR1 antibodies (e.g., 3M12 in Table 2 below and its variants) described herein bind an epitope comprising residues in amino acids amino acids 258-291 and amino acids 358-381 of SEQ ID NO: 105. In some embodiments, the anti-TfR1 antibodies described herein (e.g., 3M12 in Table 2 below and its variants) bind an epitope comprising one or more of residues K261, S273, Y282, T362, S368, S370, and K371 of human TfR1 as set forth in SEQ ID NO: 105. In some embodiments, the anti-TfR1 antibodies described herein (e.g., 3M12 in Table 2 below and its variants) bind an epitope comprising residues K261, S273, Y282, T362, S368, S370, and K371 of human TfR1 as set forth in SEQ ID NO: 105.

[0128] An example human transferrin receptor amino acid sequence, corresponding to NCBI sequence NP_003225.2 (transferrin receptor protein 1 isoform 1, Homo sapiens) is as follows:

(SEQ ID NO: 105)
MMDQARSAFSNLFGGEPLSYTRFSLARQVDGDNSHVEMKLAVDEE
ENADNNTKANVTKPKRCSGSICYGTIAVIVFFLIGFMIGYLGYCK
GVEPKTECERLAGTESPVREEPGEDFPAARRLYWDDLKRKLSEKL
DSTDFTGTIKLLNENSYVPREAGSQKDENLALYVENQFREFKLSK
VWRDQHFVKIQVKDSAQNSVIIVDKNGRLVYLVENPGGYVAYSKA
ATVTGKLVHANFGTKKDFEDLYTPVNGSIVIVRAGKITFAEKVAN
AESLNAIGVLIYMDQTKFPIVNAELSFFGHAHLGTGDPYTPGFPS
FNHTQFPPSRSSGLPNIPVQTISRAAAEKLFGNMEGDCPSDWKTD
STCRMVTSESKNVKLTVSNVLKEIKILNIFGVIKGFVEPDHYVVV
GAQRDAWGPGAAKSGVGTALLLKLAQMFSDMVLKDGFQPSRSIIF
ASWSAGDFGSVGATEWLEGYLSSLHLKAFTYINLDKAVLGTSNFK
VSASPLLYTLIEKTMQNVKHPVTGQFLYQDSNWASKVEKLTLDNA
AFPFLAYSGIPAVSFCFCEDTDYPYLGTTMDTYKELIERIPELNK
VARAAAEVAGQFVIKLTHDVELNLDYERYNSQLLSFVRDLNQYRA
DIKEMGLSLQWLYSARGDFFRATSRLTTDFGNAEKTDRFVMKKLN
DRVMRVEYHFLSPYVSPKESPFRHVFWGSGSHTLPALLENLKLRK
QNNGAFNETLFRNQLALATWTIQGAANALSGDVWDIDNEF.

[0129] An example non-human primate transferrin receptor amino acid sequence, corresponding to NCBI sequence NP_001244232.1 (transferrin receptor protein 1, Macaca mulatta) is as follows:

(SEQ ID NO: 106)
MMDQARSAFSNLFGGEPLSYTRFSLARQVDGDNSHVEMKLGVDEE
ENTDNNTKPNGTKPKRCGGNICYGTIAVIIFFLIGFMIGYLGYCK
GVEPKTECERLAGTESPAREEPEEDFPAAPRLYWDDLKRKLSEKL
DTTDFTSTIKLLNENLYVPREAGSQKDENLALYIENQFREFKLSK
VWRDQHFVKIQVKDSAQNSVIIVDKNGGLVYLVENPGGYVAYSKA
ATVTGKLVHANFGTKKDFEDLDSPVNGSIVIVRAGKITFAEKVAN
AESLNAIGVLIYMDQTKFPIVKADLSFFGHAHLGTGDPYTPGFPS
FNHTQFPPSQSSGLPNIPVQTISRAAAEKLFGNMEGDCPSDWKTD
STCKMVTSENKSVKLTVSNVLKETKILNIFGVIKGFVEPDHYVVV
GAQRDAWGPGAAKSSVGTALLLKLAQMFSDMVLKDGFQPSRSIIF
ASWSAGDFGSVGATEWLEGYLSSLHLKAFTYINLDKAVLGTSNFK
VSASPLLYTLIEKTMQDVKHPVTGRSLYQDSNWASKVEKLTLDNA
AFPFLAYSGIPAVSFCFCEDTDYPYLGTTMDTYKELVERIPELNK
VARAAAEVAGQFVIKLTHDTELNLDYERYNSQLLLFLRDLNQYRA
DVKEMGLSLQWLYSARGDFFRATSRLTTDFRNAEKRDKFVMKKLN
DRVMRVEYYFLSPYVSPKESPFRHVFWGSGSHTLSALLESLKLRR
QNNSAFNETLFRNQLALATWTIQGAANALSGDVWDIDNEF

[0130] An example non-human primate transferrin receptor amino acid sequence, corresponding to NCBI sequence XP_005545315.1 (transferrin receptor protein 1, Macaca fascicularis) is as follows:

(SEQ ID NO: 107)
MMDQARSAFSNLFGGEPLSYTRFSLARQVDGDNSHVEMKLGVDEE
ENTDNNTKANGTKPKRCGGNICYGTIAVIIFFLIGFMIGYLGYCK
GVEPKTECERLAGTESPAREEPEEDFPAAPRLYWDDLKRKLSEKL
DTTDFTSTIKLLNENLYVPREAGSQKDENLALYIENQFREFKLSK
VWRDQHFVKIQVKDSAQNSVIIVDKNGGLVYLVENPGGYVAYSKA
ATVTGKLVHANFGTKKDFEDLDSPVNGSIVIVRAGKITFAEKVAN
AESLNAIGVLIYMDQTKFPIVKADLSFFGHAHLGTGDPYTPGFPS
FNHTQFPPSQSSGLPNIPVQTISRAAAEKLFGNMEGDCPSDWKTD
STCKMVTSENKSVKLTVSNVLKETKILNIFGVIKGFVEPDHYVVV
GAQRDAWGPGAAKSSVGTALLLKLAQMFSDMVLKDGFQPSRSIIF
ASWSAGDFGSVGATEWLEGYLSSLHLKAFTYINLDKAVLGTSNFK
VSASPLLYTLIEKTMQDVKHPVTGRSLYQDSNWASKVEKLTLDNA
AFPFLAYSGIPAVSFCFCEDTDYPYLGTTMDTYKELVERIPELNK
VARAAAEVAGQFVIKLTHDTELNLDYERYNSQLLLFLRDLNQYRA
DVKEMGLSLQWLYSARGDFFRATSRLTTDFRNAEKRDKFVMKKLN
DRVMRVEYYFLSPYVSPKESPFRHVFWGSGSHTLSALLESLKLRR
QNNSAFNETLFRNQLALATWTIQGAANALSGDVWDIDNEF.

[0131] An example mouse transferrin receptor amino acid sequence, corresponding to NCBI sequence NP_001344227.1 (transferrin receptor protein 1, Mus musculus) is as follows:

(SEQ ID NO: 108)
MMDQARSAFSNLFGGEPLSYTRFSLARQVDGDNSHVEMKLAADEE
ENADNNMKASVRKPKRFNGRLCFAAIALVIFFLIGFMSGYLGYCK
RVEQKEECVKLAETEETDKSETMETEDVPTSSRLYWADLKTLLSE
KLNSIEFADTIKQLSQNTYTPREAGSQKDESLAYYIENQFHEFKF
SKVWRDEHYVKIQVKSSIGQNMVTIVQSNGNLDPVESPEGYVAFS
KPTEVSGKLVHANFGTKKDFEELSYSVNGSLVIVRAGEITFAEKV
ANAQSFNAIGVLIYMDKNKFPVVEADLALFGHAHLGTGDPYTPGF
PSFNHTQFPPSQSSGLPNIPVQTISRAAAEKLFGKMEGSCPARWN
IDSSCKLELSQNQNVKLIVKNVLKERRILNIFGVIKGYEEPDRYV
VVGAQRDALGAGVAAKSSVGTGLLLKLAQVFSDMISKDGFRPSRS
IIFASWTAGDFGAVGATEWLEGYLSSLHLKAFTYINLDKVVLGTS
NFKVSASPLLYTLMGKIMQDVKHPVDGKSLYRDSNWISKVEKLSF
DNAAYPFLAYSGIPAVSFCFCEDADYPYLGTRLDTYEALTQKVPQ
LNQMVRTAAEVAGQLIIKLTHDVELNLDYEMYNSKLLSFMKDLNQ
FKTDIRDMGLSLQWLYSARGDYFRATSRLTTDFHNAEKTNRFVMR
EINDRIMKVEYHFLSPYVSPRESPFRHIFWGSGSHTLSALVENLK
LRQKNITAFNETLFRNQLALATWTIQGVANALSGDIWNIDNEF

[0132] In some embodiments, an anti-TfR1 antibody binds to an amino acid segment of the receptor as follows: FVKIQVKDSAQNSVIIVDKNGRLVYLVENPGGYVAYSKAATVTGKLVHANFGTKKDFE DLYTPVNGSIVIVRAGKITFAEKVANAESLNAIGVLIYMDQTKFPIVNAELSFFGHAHLG TGDPYTPGFPSFNHTQFPPSRSSGLPNIPVQTISRAAAEKLFGNMEGDCPSDWKTDSTCR MVTSESKNVKLTVSNVLKE (SEQ ID NO: 109) and does not inhibit the binding interactions between transferrin receptors and transferrin and/or (e.g., and) human hemochromatosis protein (also known as HFE). In some embodiments, the anti-TfR1 antibody described herein does not bind an epitope in SEQ ID NO: 109.

[0133] Appropriate methodologies may be used to obtain and/or (e.g., and) produce antibodies, antibody fragments, or antigen-binding agents, e.g., through the use of recombinant DNA protocols. In some embodiments, an antibody may also be produced through the generation of hybridomas (see. e.g., Kohler, G and Milstein, C. “Continuous cultures of fused cells secreting antibody of predefined specificity” Nature, 1975, 256: 495-497). The antigen-of-interest may be used as the immunogen in any form or entity, e.g., recombinant or a naturally occurring form or entity. Hybridomas are screened using standard methods, e.g. ELISA screening, to find at least one hybridoma that produces an antibody that targets a particular antigen. Antibodies may also be produced through screening of protein expression libraries that express antibodies, e.g., phage display libraries. Phage display library design may also be used, in some embodiments, (sec, e.g. U.S. Pat. No. 5,223,409, filed Mar. 1, 1991, “Directed evolution of novel binding proteins”; WO 1992/18619, filed Apr. 10, 1992, “Heterodimeric receptor libraries using phagemids”; WO 1991/17271, filed May 1, 1991, “Recombinant library screening methods”; WO 1992/20791, filed May 15, 1992, “Methods for producing members of specific binding pairs”; WO 1992/15679, filed Feb. 28, 1992, and “Improved epitope displaying phage”). In some embodiments, an antigen-of-interest may be used to immunize a non-human animal, e.g., a rodent or a goat. In some embodiments, an antibody is then obtained from the non-human animal, and may be optionally modified using a number of methodologies, e.g., using recombinant DNA techniques. Additional examples of antibody production and methodologies are known in the art (sec, e.g. Harlow et al. “Antibodies: A Laboratory Manual”, Cold Spring Harbor Laboratory, 1988).

[0134] In some embodiments, an antibody is modified, e.g., modified via glycosylation, phosphorylation, sumoylation, and/or (e.g., and) methylation. In some embodiments, an antibody is a glycosylated antibody, which is conjugated to one or more sugar or carbohydrate molecules. In some embodiments, the one or more sugar or carbohydrate molecule are conjugated to the antibody via N-glycosylation, O-glycosylation, C-glycosylation, glypiation (GPI anchor attachment), and/or (e.g., and) phosphoglycosylation. In some embodiments, the one or more sugar or carbohydrate molecules are monosaccharides, disaccharides, oligosaccharides, or glycans. In some embodiments, the one or more sugar or carbohydrate molecule is a branched oligosaccharide or a branched glycan. In some embodiments, the one or more sugar or carbohydrate molecule includes a mannose unit, a glucose unit, an N-acetylglucosamine unit, an N-acetylgalactosamine unit, a galactose unit, a fucose unit, or a phospholipid unit. In some embodiments, there are about 1-10, about 1-5, about 5-10, about 1-4, about 1-3, or about 2 sugar molecules. In some embodiments, a glycosylated antibody is fully or partially glycosylated. In some embodiments, an antibody is glycosylated by chemical reactions or by enzymatic means. In some embodiments, an antibody is glycosylated in vitro or inside a cell, which may optionally be deficient in an enzyme in the N- or O-glycosylation pathway, e.g. a glycosyltransferase. In some embodiments, an antibody is functionalized with sugar or carbohydrate molecules as described in International Patent Application Publication WO2014065661, published on May 1, 2014, entitled, “Modified antibody, antibody-conjugate and process for the preparation thereof”.

[0135] In some embodiments, the anti-TfR1 antibody of the present disclosure comprises a VL domain and/or (e.g., and) a VH domain of any one of the anti-TfR1 antibodies selected from any one of Tables 2-7, and comprises a constant region comprising the amino acid sequences of the constant regions of an IgG, IgE, IgM, IgD, IgA or IgY immunoglobulin molecule, any class (e.g., IgG1, IgG2, IgG3, IgG4, IgA1 and IgA2), or any subclass (e.g., IgG2a and IgG2b) of immunoglobulin molecule. Non-limiting examples of human constant regions are described in the art, e.g., sec Kabat E A et al., (1991) supra.

[0136] In some embodiments, agents binding to transferrin receptor, e.g., anti-TfR1 antibodies, are capable of targeting muscle cell and/or (e.g., and) mediate the transportation of an agent across the blood brain barrier. Transferrin receptors are internalizing cell surface receptors that transport transferrin across the cellular membrane and participate in the regulation and homeostasis of intracellular iron levels. Some aspects of the disclosure provide transferrin receptor binding proteins, which are capable of binding to transferrin receptor. Antibodies that bind, e.g. specifically bind, to a transferrin receptor may be internalized into the cell, e.g. through receptor-mediated endocytosis, upon binding to a transferrin receptor.

[0137] Provided herein, in some aspects, are humanized antibodies that bind to transferrin receptor with high specificity and affinity. In some embodiments, the humanized anti-TfR1 antibody described herein specifically binds to any extracellular epitope of a transferrin receptor or an epitope that becomes exposed to an antibody. In some embodiments, the humanized anti-TfR1 antibodies provided herein bind specifically to transferrin receptor from human, non-human primates, mouse, rat, etc. In some embodiments, the humanized anti-TfR1 antibodies provided herein bind to human transferrin receptor. In some embodiments, the humanized anti-TfR1 antibody described herein binds to an amino acid segment of a human or non-human primate transferrin receptor, as provided in SEQ ID NOs: 105-108. In some embodiments, the humanized anti-TfR1 antibody described herein binds to an amino acid segment corresponding to amino acids 90-96 of a human transferrin receptor as set forth in SEQ ID NO: 105, which is not in the apical domain of the transferrin receptor. In some embodiments, the humanized anti-TfR1 antibodies described herein binds to TfR1 but does not bind to TfR2.

[0138] In some embodiments, an anti-TFR1 antibody specifically binds a TfR1 (e.g., a human or non-human primate TfR1) with binding affinity (e.g., as indicated by Kd) of at least about 10⁻⁴ M, 10⁻⁵ M, 10⁻⁶ M, 10⁻⁷ M, 10⁻⁸ M, 10⁻⁹ M, 10⁻¹⁰ M, 10⁻¹¹ M, 10⁻¹² M, 10⁻¹³ M, or less. In some embodiments, the anti-TfR1 antibodies described herein bind to TfR1 with a KD of sub-nanomolar range. In some embodiments, the anti-TfR1 antibodies described herein selectively bind to transferrin receptor 1 (TfR1) but do not bind to transferrin receptor 2 (TfR2). In some embodiments, the anti-TfR1 antibodies described herein bind to human TfR1 and cyno TfR1 (e.g., with a Kd of 10⁻⁷ M, 10⁻⁸ M, 10⁻⁹ M, 10⁻¹⁰ M, 10⁻¹¹ M, 10⁻¹² M, 10⁻¹³ M, or less), but do not bind to a mouse TfR1. The affinity and binding kinetics of the anti-TfR1 antibody can be tested using any suitable method including but not limited to biosensor technology (e.g., OCTET or BIACORE). In some embodiments, binding of any one of the anti-TfR1 antibodies described herein does not complete with or inhibit transferrin binding to the TfR1. In some embodiments, binding of any one of the anti-TfR1 antibodies described herein does not complete with or inhibit HFE-beta-2-microglobulin binding to the TfR1.

[0139] Non-limiting examples of anti-TfR1 antibodies are provided in Table 2.

TABLE 2
Examples of Anti-TfR1 Antibodies

| | No. | | | |
|---|---|---|---|---|
| Ab | system | IMGT | Kabat | Chothia |
| 3-A4 | CDR- | GFNIKDDY (SEQ ID NO: | DDYMY (SEQ ID NO: 7) | GFNIKDD (SEQ ID NO: 12) |
| | H1 | 1) | | |
| | CDR- | IDPENGDT (SEQ ID NO: | WIDPENGDTEYASKFQD | ENG (SEQ ID NO: 13) |
| | H2 | 2) | (SEQ ID NO: 8) | |
| | CDR- | TLWLRRGLDY (SEQ ID | WLRRGLDY (SEQ ID NO: 9) | LRRGLD (SEQ ID NO: 14) |
| | H3 | NO: 3) | | |
| | CDR- | KSLLHSNGYTY (SEQ ID | RSSKSLLHSNGYTYLF (SEQ | SKSLLHSNGYTY (SEQ ID |
| | L1 | NO: 4) | ID NO: 10) | NO: 15) |
| | CDR- | RMS (SEQ ID NO: 5) | RMSNLAS (SEQ ID NO: 11) | RMS (SEQ ID NO: 5) |
| | L2 | | | |
| | CDR- | MQHLEYPFT (SEQ ID | MQHLEYPFT (SEQ ID NO: 6) | HLEYPF (SEQ ID NO: 16) |
| | L3 | NO: 6) | | |
| | VH | EVQLQQSGAELVRPGASVKLSCTASGFNIKDDYMYWVKQRPEQGLEWIGWIDPENGDT | | |
| | | EYASKFQDKATVTADTSSNTAYLQLSSLTSEDTAVYYCTLWLRRGLDYWGQGTSVTVS | | |
| | | S (SEQ ID NO: 17) | | |
| | VL | DIVMTQAAPSVPVTPGESVSISCRSSKSLLHSNGYTYLFWFLQRPGQSPQLLIYRMSNLA | | |
| | | SGVPDRFSGSGSGTAFTLRISRVEAEDVGVYYCMQHLEYPFTFGGGTKLEIK (SEQ ID | | |
| | | NO: 18) | | |
| 3-A4 | CDR- | GFNIKDDY (SEQ ID NO: | DDYMY (SEQ ID NO: 7) | GFNIKDD (SEQ ID NO: 12) |
| N54T* | H1 | 1) | | |
| | CDR- | IDPETGDT (SEQ ID NO: | WIDPETGDTEYASKFQD | ETG (SEQ ID NO: 21) |
| | H2 | 19) | (SEQ ID NO: 20) | |
| | CDR- | TLWLRRGLDY (SEQ ID | WLRRGLDY (SEQ ID NO: 9) | LRRGLD (SEQ ID NO: 14) |
| | H3 | NO: 3) | | |
| | CDR- | KSLLHSNGYTY (SEQ ID | RSSKSLLHSNGYTYLF (SEQ | SKSLLHSNGYTY (SEQ ID |
| | L1 | NO: 4) | ID NO: 10) | NO: 15) |
| | CDR- | RMS (SEQ ID NO: 5) | RMSNLAS (SEQ ID NO: 11) | RMS(SEQ ID NO: 5) |
| | L2 | | | |
| | CDR- | MQHLEYPFT (SEQ ID | MQHLEYPFT (SEQ ID NO: 6) | HLEYPF (SEQ ID NO: 16) |
| | L3 | NO: 6) | | |
| | VH | EVQLQQSGAELVRPGASVKLSCTASGFNIKDDYMYWVKORPEQGLEWIGWIDPETGDT | | |
| | | EYASKFQDKATVTADTSSNTAYLQLSSLTSEDTAVYYCTLWLRRGLDYWGQGTSVTVS | | |
| | | S (SEQ ID NO: 22) | | |
| | VL | DIVMTQAAPSVPVTPGESVSISCRSSKSLLHSNGYTYLFWFLQRPGQSPQLLIYRMSNLA | | |
| | | SGVPDRFSGSGSGTAFTLRISRVEAEDVGVYYCMQHLEYPFTFGGGTKLEIK (SEQ ID | | |
| | | NO: 18) | | |
| 3-A4 | CDR- | GFNIKDDY (SEQ ID NO: | DDYMY (SEQ ID NO: 7) | GFNIKDD (SEQ ID NO: 12) |
| N54S* | H1 | 1) | | |
| | CDR- | IDPESGDT (SEQ ID NO: | WIDPESGDTEYASKFQD | ESG (SEQ ID NO: 25) |
| | H2 | 23) | (SEQ ID NO: 24) | |
| | CDR- | TLWLRRGLDY (SEQ ID | WLRRGLDY (SEQ ID NO: 9) | LRRGLD (SEQ ID NO: 14) |
| | H3 | NO: 3) | | |
| | CDR- | KSLLHSNGYTY (SEQ ID | RSSKSLLHSNGYTYLF (SEQ | SKSLLHSNGYTY (SEQ ID |
| | L1 | NO: 4) | ID NO: 10) | NO: 15) |
| | CDR- | RMS (SEQ ID NO: 5) | RMSNLAS (SEQ ID NO: 11) | RMS (SEQ ID NO: 5) |
| | L2 | | | |
| | CDR- | MQHLEYPFT (SEQ ID | MQHLEYPFT (SEQ ID NO: 6) | HLEYPF (SEQ ID NO: 16) |
| | L3 | NO: 6) | | |
| | VH | EVQLQQSGAELVRPGASVKLSCTASGFNIKDDYMYWVKQRPEQGLEWIGWIDPESGDT | | |
| | | EYASKFQDKATVTADTSSNTAYLQLSSLTSEDTAVYYCTLWLRRGLDYWGQGTSVTVS | | |
| | | S (SEQ ID NO: 26) | | |
| | VL | DIVMTQAAPSVPVTPGESVSISCRSSKSLLHSNGYTYLFWFLQRPGQSPQLLIYRMSNLA | | |
| | | SGVPDRFSGSGSGTAFTLRISRVEAEDVGVYYCMQHLEYPFTFGGGTKLEIK (SEQ ID | | |
| | | NO: 18) | | |
| 3-M12 | CDR- | GYSITSGYY (SEQ ID | SGYYWN (SEQ ID NO: 33) | GYSITSGY (SEQ ID NO: |
| | H1 | NO: 27) | | 38) |
| | CDR- | ITFDGAN (SEQ ID NO: | YITFDGANNYNPSLKN (SEQ | FDG (SEQ ID NO: 39) |
| | H2 | 28) | ID NO: 34) | |
| | CDR- | TRSSYDYDVLDY (SEQ | SSYDYDVLDY (SEQ ID NO: | SYDYDVLD (SEQ ID NO: |
| | H3 | ID NO: 29) | 35) | 40) |
| | CDR- | QDISNF (SEQ ID NO: 30) | RASQDISNFLN (SEQ ID NO: | SQDISNF (SEQ ID NO: 41) |
| | L1 | | 36) | |
| | CDR- | YTS (SEQ ID NO: 31) | YTSRLHS (SEQ ID NO: 37) | YTS (SEQ ID NO: 31) |
| | L2 | | | |
| | CDR- | QQGHTLPYT (SEQ ID | QQGHTLPYT (SEQ ID NO: 32) | GHTLPY (SEQ ID NO: 42) |
| | L3 | NO: 32) | | |
| | VH | DVQLQESGPGLVKPSQSLSLTCSVTGYSITSGYYWNWIRQFPGNKLEWMGYITFDGAN | | |
| | | NYNPSLKNRISITRDTSKNQFFLKLTSVTTEDTATYYCTRSSYDYDVLDYWGQGTTLTV | | |
| | | SS (SEQ ID NO: 43) | | |
| | VL | DIQMTQTTSSLSASLGDRVTISCRASQDISNFLNWYQQRPDGTVKLLIYYTSRLHSGVPS | | |
| | | RFSGSGSGTDFSLTVSNLEQEDIATYFCQQGHTLPYTFGGGTKLEIK (SEQ ID NO: 44) | | |
| 5-H12 | CDR- | GYSFTDYC (SEQ ID NO: | DYCIN (SEQ ID NO: 51) | GYSFTDY (SEQ ID NO: 56) |
| | H1 | 45) | | |
| | CDR- | IYPGSGNT (SEQ ID NO: | WIYPGSGNTRYSERFKG | GSG (SEQ ID NO: 57) |
| | H2 | 46) | (SEQ ID NO: 52) | |
| | CDR- | AREDYYPYHGMDY | EDYYPYHGMDY (SEQ ID | DYYPYHGMD (SEQ ID |
| | H3 | (SEQ ID NO: 47) | NO: 53) | NO: 58) |
| | CDR- | ESVDGYDNSF (SEQ ID | RASESVDGYDNSFMH (SEQ | SESVDGYDNSF (SEQ ID |
| | L1 | NO: 48) | ID NO: 54) | NO: 59) |
| | CDR- | RAS (SEQ ID NO: 49) | RASNLES (SEQ ID NO: 55) | RAS (SEQ ID NO: 49) |
| | L2 | | | |
| | CDR- | QQSSEDPWT (SEQ ID | QQSSEDPWT (SEQ ID NO: 50) | SSEDPW (SEQ ID NO: 60) |
| | L3 | NO: 50) | | |
| | VH | QIQLQQSGPELVRPGASVKISCKASGYSFTDYCINWVNQRPGQGLEWIGWIYPGSGNTR | | |
| | | YSERFKGKATLTVDTSSNTAYMQLSSLTSEDSAVYFCAREDYYPYHGMDYWGQGTSV | | |
| | | TVSS (SEQ ID NO: 61) | | |
| | VL | DIVLTQSPTSLAVSLGQRATISCRASESVDGYDNSFMHWYQQKPGQPPKLLIFRASNLES | | |
| | | GIPARFSGSGSRTDFTLTINPVEAADVATYYCQQSSEDPWTFGGGTKLEIK (SEQ ID NO: | | |
| | | 62) | | |
| 5-H12 | CDR- | GYSFTDYY (SEQ ID | DYYIN (SEQ ID NO: 64) | GYSFTDY (SEQ ID NO: 56) |
| C33Y* | H1 | NO: 63) | | |
| | CDR- | IYPGSGNT (SEQ ID NO: | WIYPGSGNTRYSERFKG | GSG (SEQ ID NO: 57) |
| | H2 | 46) | (SEQ ID NO: 52) | |
| | CDR- | AREDYYPYHGMDY | EDYYPYHGMDY (SEQ ID | DYYPYHGMD (SEQ ID |
| | H3 | (SEQ ID NO: 47) | NO: 53) | NO: 58) |
| | CDR- | ESVDGYDNSF (SEQ ID | RASESVDGYDNSFMH (SEQ | SESVDGYDNSF (SEQ ID |
| | L1 | NO: 48) | ID NO: 54) | NO: 59) |
| | CDR- | RAS (SEQ ID NO: 49) | RASNLES (SEQ ID NO: 55) | RAS (SEQ ID NO: 49) |
| | L2 | | | |
| | CDR- | QQSSEDPWT (SEQ ID | QQSSEDPWT (SEQ ID NO: 50) | SSEDPW (SEQ ID NO: 60) |
| | L3 | NO: 50) | | |
| | VH | QIQLQQSGPELVRPGASVKISCKASGYSFTDYYINWVNQRPGQGLEWIGWIYPGSGNTR | | |
| | | YSERFKGKATLTVDTSSNTAYMQLSSLTSEDSAVYFCAREDYYPYHGMDYWGQGTSV | | |
| | | TVSS (SEQ ID NO: 65) | | |
| | VL | DIVLTQSPTSLAVSLGQRATISCRASESVDGYDNSFMHWYQQKPGQPPKLLIFRASNLES | | |
| | | GIPARFSGSGSRTDFTLTINPVEAADVATYYCQQSSEDPWTFGGGTKLEIK (SEQ ID NO: | | |
| | | 62) | | |
| 5-H12 | CDR- | GYSFTDYD (SEQ ID | DYDIN (SEQ ID NO: 67) | GYSFTDY (SEQ ID NO: 56) |
| C33D* | H1 | NO: 66) | | |
| | CDR- | IYPGSGNT (SEQ ID NO: | WIYPGSGNTRYSERFKG | GSG (SEQ ID NO: 57) |
| | H2 | 46) | (SEQ ID NO: 52) | |
| | CDR- | AREDYYPYHGMDY | EDYYPYHGMDY (SEQ ID | DYYPYHGMD (SEQ ID |
| | H3 | (SEQ ID NO: 47) | NO: 53) | NO: 58) |
| | CDR- | ESVDGYDNSF (SEQ ID | RASESVDGYDNSFMH (SEQ | SESVDGYDNSF (SEQ ID |
| | L1 | NO: 48) | ID NO: 54) | NO: 59) |
| | CDR- | RAS (SEQ ID NO: 49) | RASNLES (SEQ ID NO: 55) | RAS (SEQ ID NO: 49) |
| | L2 | | | |
| | CDR- | QQSSEDPWT (SEQ ID | QQSSEDPWT (SEQ ID NO: 50) | SSEDPW (SEQ ID NO: 60) |
| | L3 | NO: 50) | | |
| | VH | QIQLQQSGPELVRPGASVKISCKASGYSFTDYDINWVNQRPGQGLEWIGWIYPGSGNTRY | | |
| | | SERFKGKATLTVDTSSNTAYMQLSSLTSEDSAVYFCAREDYYPYHGMDYWGQGTSVTV | | |
| | | SS (SEQ ID NO: 68) | | |
| | VL | DIVLTQSPTSLAVSLGQRATISCRASESVDGYDNSFMHWYQQKPGQPPKLLIFRASNLES | | |
| | | GIPARFSGSGSRTDFTLTINPVEAADVATYYCQQSSEDPWTFGGGTKLEIK (SEQ ID NO: | | |
| | | 62) | | |
| Anti- | CDR- | GYSFTSYW (SEQ ID | SYWIG (SEQ ID NO: 144) | GYSFTSY (SEQ ID NO: |
| TfR | H1 | NO: 138) | | 149 |
| clone 8 | | | | |
| | CDR- | IYPGDSDT (SEQ ID NO: | IIYPGDSDTRYSPSFQGQ | GDS (SEQ ID NO: 150) |
| | H2 | 139) | (SEQ ID NO: 145) | |
| | CDR- | ARFPYDSSGYYSFDY | FPYDSSGYYSFDY (SEQ ID | PYDSSGYYSFD (SEQ ID |
| | H3 | (SEQ ID NO: 140) | NO: 146) | NO: 151) |
| | CDR- | QSISSY (SEQ ID NO: | RASQSISSYLN (SEQ ID NO: | SQSISSY (SEQ ID NO: 152) |
| | L1 | 141) | 147) | |
| | CDR- | AAS (SEQ ID NO: 142) | AASSLQS (SEQ ID NO: 148) | AAS (SEQ ID NO: 142) |
| | L2 | | | |
| | CDR- | QQSYSTPLT (SEQ ID | QQSYSTPLT (SEQ ID NO: | SYSTPL (SEQ ID NO: 153) |
| | L3 | NO: 143) | 143) | |

*mutation positions are according to Kabat numbering of the respective VH sequences containing the mutations

[0140] In some embodiments, the anti-TfR1 antibody of the present disclosure is a humanized variant of any one of the anti-TfR1 antibodies provided in Table 2. In some embodiments, the anti-TfR1 antibody of the present disclosure comprises a CDR-H1, a CDR-H2, a CDR-H3, a CDR-L1, a CDR-L2, and a CDR-L3 that are the same as the CDR-H1, CDR-H2, and CDR-H3 in any one of the anti-TfR1 antibodies provided in Table 2, and comprises a humanized heavy chain variable region and/or (e.g., and) a humanized light chain variable region.

[0141] Examples of amino acid sequences of anti-TfR1 antibodies described herein are provided in Table 3.

TABLE 3
Variable Regions of Anti-TfR1 Antibodies

| Antibody | Variable Region Amino Acid Sequence** |
|---|---|
| 3A4 | V_{H}: |
| VH3 (N54T*)/VK4 | EVQLVQSGSELKKPGASVKVSCTASGFNIKDDYMYWVRQPPGKGLEWIGWIDP |
| | ETGDTEYASKFQDRVTVTADTSTNTAYMELSSLRSEDTAVYYCTLWLRRGLD |
| | YWGQGTLVTVSS (SEQ ID NO: 69) |
| | V_{L}: |
| | DIVMTQSPLSLPVTPGEPASISCRSSKSLLHSNGYTYLFWFQQRPGQSPRLLIYR |
| | MSNLASGVPDRFSGSGSGTDFTLKISRVEAEDVGVYYCMQHLEYPFTFGGGTK |
| | VEIK (SEQ ID NO: 70) |
| 3A4 | V_{H}: |
| VH3 (N54S*)/VK4 | EVQLVQSGSELKKPGASVKVSCTASGFNIKDDYMYWVRQPPGKGLEWIGWIDP |
| | ESGDTEYASKFQDRVTVTADTSTNTAYMELSSLRSEDTAVYYCTLWLRRGLD |
| | YWGQGTLVTVSS (SEQ ID NO: 71) |
| | V_{L}: |
| | DIVMTQSPLSLPVTPGEPASISCRSSKSLLHSNGYTYLFWFQQRPGQSPRLLIYR |
| | MSNLASGVPDRFSGSGSGTDFTLKISRVEAEDVGVYYCMQHLEYPFTFGGGTK |
| | VEIK (SEQ ID NO: 70) |
| 3A4 | V_{H}: |
| VH3/VK4 | EVQLVQSGSELKKPGASVKVSCTASGFNIKDDYMYWVRQPPGKGLEWIGWIDP |
| | ENGDTEYASKFQDRVTVTADTSTNTAYMELSSLRSEDTAVYYCTLWLRRGLD |
| | YWGQGTLVTVSS (SEQ ID NO: 72) |
| | V_{L}: |
| | DIVMTQSPLSLPVTPGEPASISCRSSKSLLHSNGYTYLFWFQQRPGQSPRLLIYR |
| | MSNLASGVPDRFSGSGSGTDFTLKISRVEAEDVGVYYCMQHLEYPFTFGGGTK |
| | VEIK (SEQ ID NO: 70) |
| 3M12 | V_{H}: |
| VH3/VK2 | QVQLQESGPGLVKPSQTLSLTCSVTGYSITSGYYWNWIRQPPGKGLEWMGYITF |
| | DGANNYNPSLKNRVSISRDTSKNQFSLKLSSVTAEDTATYYCTRSSYDYDVLDY |
| | WGQGTTVTVSS (SEQ ID NO: 73) |
| | V_{L}: |
| | DIQMTQSPSSLSASVGDRVTITCRASQDISNFLNWYQQKPGQPVKLLIYYTSRLH |
| | SGVPSRFSGSGSGTDFTLTISSLQPEDFATYFCQQGHTLPYTFGQGTKLEIK (SEQ |
| | ID NO: 74) |
| 3M12 | V_{H}: |
| VH3/VK3 | QVQLQESGPGLVKPSQTLSLTCSVTGYSITSGYYWNWIRQPPGKGLEWMGYITF |
| | DGANNYNPSLKNRVSISRDTSKNQFSLKLSSVTAEDTATYYCTRSSYDYDVLDY |
| | WGQGTTVTVSS (SEQ ID NO: 73) |
| | V_{L}: |
| | DIQMTQSPSSLSASVGDRVTITCRASQDISNFLNWYQQKPGQPVKLLIYYTSRLH |
| | SGVPSRFSGSGSGTDFTLTISSLQPEDFATYYCQQGHTLPYTFGQGTKLEIK (SEQ |
| | ID NO: 75) |
| 3M12 | V_{H}: |
| VH4/VK2 | QVQLQESGPGLVKPSQTLSLTCTVTGYSITSGYYWNWIRQPPGKGLEWIGYITFD |
| | GANNYNPSLKNRVSISRDTSKNQFSLKLSSVTAEDTATYYCTRSSYDYDVLDYW |
| | GQGTTVTVSS (SEQ ID NO: 76) |
| | V_{L}: |
| | DIQMTQSPSSLSASVGDRVTITCRASQDISNFLNWYQQKPGQPVKLLIYYTSRLH |
| | SGVPSRFSGSGSGTDFTLTISSLQPEDFATYFCQQGHTLPYTFGQGTKLEIK (SEQ |
| | ID NO: 74) |
| 3M12 | V_{H}: |
| VH4/VK3 | QVQLQESGPGLVKPSQTLSLTCTVTGYSITSGYYWNWIRQPPGKGLEWIGYITFD |
| | GANNYNPSLKNRVSISRDTSKNQFSLKLSSVTAEDTATYYCTRSSYDYDVLDYW |
| | GQGTTVTVSS (SEQ ID NO: 76) |
| | V_{L}: |
| | DIQMTQSPSSLSASVGDRVTITCRASQDISNFLNWYQQKPGQPVKLLIYYTSRLH |
| | SGVPSRFSGSGSGTDFTLTISSLQPEDFATYYCQQGHTLPYTFGQGTKLEIK (SEQ |
| | ID NO: 75) |
| 5H12 | V_{H}: |
| VH5 (C33Y*)/VK3 | QVQLVQSGAEVKKPGASVKVSCKASGYSFTDYYINWVRQAPGQGLEWMGWIY |
| | PGSGNTRYSERFKGRVTITRDTSASTAYMELSSLRSEDTAVYYCAREDYYPYH |
| | GMDYWGQGTLVTVSS (SEQ ID NO: 77) |
| | V_{L}: |
| | DIVLTQSPDSLAVSLGERATINCRASESVDGYDNSFMHWYQQKPGQPPKLLIFR |
| | ASNLESGVPDRFSGSGSRTDFTLTISSLQAEDVAVYYCQQSSEDPWTFGQGTKL |
| | EIK (SEQ ID NO: 78) |
| 5H12 | V_{H}: |
| VH5 (C33D*)/VK4 | QVQLVQSGAEVKKPGASVKVSCKASGYSFTDYDINWVRQAPGQGLEWMGWIY |
| | PGSGNTRYSERFKGRVTITRDTSASTAYMELSSLRSEDTAVYYCAREDYYPYH |
| | GMDYWGQGTLVTVSS (SEQ ID NO: 79) |
| | V_{L}: |
| | DIVMTQSPDSLAVSLGERATINCRASESVDGYDNSFMHWYQQKPGQPPKLLIFR |
| | ASNLESGVPDRFSGSGSGTDFTLTISSLQAEDVAVYYCQQSSEDPWTFGQGTKL |
| | EIK (SEQ ID NO: 80) |
| 5H12 | V_{H}: |
| VH5 (C33Y*)/VK4 | QVQLVQSGAEVKKPGASVKVSCKASGYSFTDYYINWVRQAPGQGLEWMGWIY |
| | PGSGNTRYSERFKGRVTITRDTSASTAYMELSSLRSEDTAVYYCAREDYYPYH |
| | GMDYWGQGTLVTVSS (SEQ ID NO: 77) |
| | V_{L}: |
| | DIVMTQSPDSLAVSLGERATINCRASESVDGYDNSFMHWYQQKPGQPPKLLIFR |
| | ASNLESGVPDRFSGSGSGTDFTLTISSLQAEDVAVYYCQQSSEDPWTFGQGTKL |
| | EIK (SEQ ID NO: 80) |
| Anti-TfR clone 8 | V_{H}: |
| | QVQLVQSGAEVKKPGESLKISCKGSGYSFTSYWIGWVRQMPGKGLEWMGIIYP |
| | GDSDTRYSPSFQGQVTISADKSISTAYLQWSSLKASDTAMYYCARFPYDSSGYY |
| | SFDYWGQGTLVTVSS (SEQ ID NO: 154) |
| | V_{L}: |
| | DIQMTQSPSSLSASVGDRVTITCRASQSISSYLNWYQQKPGKAPKLLIYAASSLQ |
| | SGVPSRFSGSGSGTDFTLTISSLQPEDFATYYCQQSYSTPLTFGGGTKVEIK (SEQ |
| | ID NO: 155) |

*mutation positions are according to Kabat numbering of the respective VH sequences containing the mutations
**CDRs according to the Kabat numbering system are bolded

[0142] In some embodiments, the anti-TfR1 antibody of the present disclosure comprises a VH comprising the CDR-H1, CDR-H2, and CDR-H3 of any one of the anti-TfR1 antibodies provided in Table 3 and comprises one or more (e.g., 1, 2, 3, 4, 5, 6, 7, 8, 9, 10 or more) amino acid variations in the framework regions as compared with the respective VH provided in Table 3. Alternatively or in addition (e.g., in addition), the anti-TfR1 antibody of the present disclosure comprises a VL comprising the CDR-L1, CDR-L2, and CDR-L3 of any one of the anti-TfR1 antibodies provided in Table 3 and comprises one or more (e.g., 1, 2, 3, 4, 5, 6, 7, 8, 9, 10 or more) amino acid variations in the framework regions as compared with the respective VL provided in Table 3. In some embodiments, the VH of the anti-TfR1 antibody is a humanized VH, and/or the VL of the anti-TfR1 antibody is a humanized VL.

[0143] In some embodiments, the anti-TfR1 antibody of the present disclosure comprises a VH comprising the CDR-H1, CDR-H2, and CDR-H3 of any one of the anti-TfR1 antibodies provided in Table 3 and comprising an amino acid sequence that is at least 70% (e.g., at least 70%, at least 75%, at least 80%, at least 85%, at least 90%, at least 95%, at least 99%) identical in the framework regions as compared with the respective VH provided in Table 3. Alternatively or in addition (e.g., in addition), the anti-TfR1 antibody of the present disclosure comprises a VL comprising the CDR-L1, CDR-L2, and CDR-L3 of any one of the anti-TfR1 antibodies provided in Table 3 and comprising an amino acid sequence that is at least 70% (e.g., at least 70%, at least 75%, at least 80%, at least 85%, at least 90%, at least 95%, at least 99%) identical in the framework regions as compared with the respective VL provided in Table 3. In some embodiments, the VH of the anti-TfR1 antibody is a humanized VH, and/or the VL of the anti-TfR1 antibody is a humanized VL.

[0144] In some embodiments, the anti-TfR1 antibody of the present disclosure comprises a VH comprising the amino acid sequence of SEQ ID NO: 69 and a VL comprising the amino acid sequence of SEQ ID NO: 70.

[0145] In some embodiments, the anti-TfR1 antibody of the present disclosure comprises a VH comprising the amino acid sequence of SEQ ID NO: 71 and a VL comprising the amino acid sequence of SEQ ID NO: 70.

[0146] In some embodiments, the anti-TfR1 antibody of the present disclosure comprises a VH comprising the amino acid sequence of SEQ ID NO: 72 and a VL comprising the amino acid sequence of SEQ ID NO: 70.

[0147] In some embodiments, the anti-TfR1 antibody of the present disclosure comprises a VH comprising the amino acid sequence of SEQ ID NO: 73 and a VL comprising the amino acid sequence of SEQ ID NO: 74.

[0148] In some embodiments, the anti-TfR1 antibody of the present disclosure comprises a VH comprising the amino acid sequence of SEQ ID NO: 73 and a VL comprising the amino acid sequence of SEQ ID NO: 75.

[0149] In some embodiments, the anti-TfR1 antibody of the present disclosure comprises a VH comprising the amino acid sequence of SEQ ID NO: 76 and a VL comprising the amino acid sequence of SEQ ID NO: 74.

[0150] In some embodiments, the anti-TfR1 antibody of the present disclosure comprises a VH comprising the amino acid sequence of SEQ ID NO: 76 and a VL comprising the amino acid sequence of SEQ ID NO: 75.

[0151] In some embodiments, the anti-TfR1 antibody of the present disclosure comprises a VH comprising the amino acid sequence of SEQ ID NO: 77 and a VL comprising the amino acid sequence of SEQ ID NO: 78.

[0152] In some embodiments, the anti-TfR1 antibody of the present disclosure comprises a VH comprising the amino acid sequence of SEQ ID NO: 79 and a VL comprising the amino acid sequence of SEQ ID NO: 80.

[0153] In some embodiments, the anti-TfR1 antibody of the present disclosure comprises a VH comprising the amino acid sequence of SEQ ID NO: 77 and a VL comprising the amino acid sequence of SEQ ID NO: 80.

[0154] In some embodiments, the anti-TfR1 antibody of the present disclosure comprises a VH comprising the amino acid sequence of SEQ ID NO: 154 and a VL comprising the amino acid sequence of SEQ ID NO: 155.

[0155] In some embodiments, the anti-TfR1 antibody described herein is a full-length IgG, which can include a heavy constant region and a light constant region from a human antibody. In some embodiments, the heavy chain of any of the anti-TfR1 antibodies as described herein may comprise a heavy chain constant region (CH) or a portion thereof (e.g., CH1, CH2, CH3, or a combination thereof). The heavy chain constant region can be of any suitable origin, e.g., human, mouse, rat, or rabbit. In one specific example, the heavy chain constant region is from a human IgG (a gamma heavy chain), e.g., IgG1, IgG2, or IgG4. An example of a human IgG1 constant region is given below:

(SEQ ID NO: 81)
[sequence omitted]

[0156] In some embodiments, the heavy chain of any of the anti-TfR1 antibodies described herein comprises a mutant human IgG1 constant region. For example, the introduction of LALA mutations (a mutant derived from mAb b12 that has been mutated to replace the lower hinge residues Leu234 Leu235 with Ala234 and Ala235) in the CH2 domain of human IgG1 is known to reduce Fcγ receptor binding (Bruhns, P., et al. (2009) and Xu, D. et al. (2000)). The mutant human IgG1 constant region is provided below (mutations bonded and underlined):

(SEQ ID NO: 82)
ASTKGPSVFPLAPSSKSTSGGTAALGCLVKDYFPEPVTVSWNSGALTSG
VHTFPAVLQSSGLYSLSSVVTVPSSSLGTQTYICNVNHKPSNTKVDKKV
EPKSCDKTHTCPPCPAPEAAGGPSVFLFPPKPKDTLMISRTPEVTCVVV
DVSHEDPEVKFNWYVDGVEVHNAKTKPREEQYNSTYRVVSVLTVLHQDW
LNGKEYKCKVSNKALPAPIEKTISKAKGQPREPQVYTLPPSRDELTKNQ
VSLTCLVKGFYPSDIAVEWESNGQPENNYKTTPPVLDSDGSFFLYSKLT
VDKSRWQQGNVFSCSVMHEALHNHYTQKSLSLSPGK

[0157] In some embodiments, the light chain of any of the anti-TfR1 antibodies described herein may further comprise a light chain constant region (CL), which can be any CL known in the art. In some examples, the CL is a kappa light chain. In other examples, the CL is a lambda light chain. In some embodiments, the CL is a kappa light chain, the sequence of which is provided below:

(SEQ ID NO: 83)
RTVAAPSVFIFPPSDEQLKSGTASVVCLLNNFYPREAKVQWKVDNALQS
GNSQESVTEQDSKDSTYSLSSTLTLSKADYEKHKVYACEVTHQGLSSPV
TKSFNRGEC

[0158] Other antibody heavy and light chain constant regions are well known in the art, e.g., those provided in the IMGT database (www.imgt.org) or at www.vbase2.org/vbstat.php, both of which are incorporated by reference herein.

[0159] In some embodiments, the anti-TfR1 antibody described herein comprises a heavy chain comprising any one of the VH as listed in Table 3 or any variants thereof and a heavy chain constant region that is at least 80%, at least 85%, at least 90%, at least 95%, or at least 99% identical to SEQ ID NO: 81 or SEQ ID NO: 82. In some embodiments, the anti-TfR1 antibody described herein comprises a heavy chain comprising any one of the VH as listed in Table 3 or any variants thereof and a heavy chain constant region that contains no more than 25 amino acid variations (e.g., no more than 25, 24, 23, 22, 21, 20, 19, 18, 17, 16, 15, 14, 13, 12, 11, 10, 9, 8, 7, 6, 5, 4, 3, 2, or 1 amino acid variation) as compared with SEQ ID NO: 81 or SEQ ID NO: 82. In some embodiments, the anti-TfR1 antibody described herein comprises a heavy chain comprising any one of the VH as listed in Table 3 or any variants thereof and a heavy chain constant region as set forth in SEQ ID NO: 81. In some embodiments, the anti-TfR1 antibody described herein comprises heavy chain comprising any one of the VH as listed in Table 3 or any variants thereof and a heavy chain constant region as set forth in SEQ ID NO: 82.

[0160] In some embodiments, the anti-TfR1 antibody described herein comprises a light chain comprising any one of the VL as listed in Table 3 or any variants thereof and a light chain constant region that is at least 80%, at least 85%, at least 90%, at least 95%, or at least 99% identical to SEQ ID NO: 83. In some embodiments, the anti-TfR1 antibody described herein comprises a light chain comprising any one of the VL as listed in Table 3 or any variants thereof and a light chain constant region contains no more than 25 amino acid variations (e.g., no more than 25, 24, 23, 22, 21, 20, 19, 18, 17, 16, 15, 14, 13, 12, 11, 10, 9, 8, 7, 6, 5, 4, 3, 2, or 1 amino acid variation) as compared with SEQ ID NO: 83. In some embodiments, the anti-TfR1 antibody described herein comprises a light chain comprising any one of the VL as listed in Table 3 or any variants thereof and a light chain constant region set forth in SEQ ID NO: 83.

[0161] Examples of IgG heavy chain and light chain amino acid sequences of the anti-TfR1 antibodies described are provided in Table 4 below.

TABLE 4
Heavy chain and light chain sequences of examples of anti-TfR1 IgGs

| Antibody | IgG Heavy Chain/Light Chain Sequences** |
|---|---|
| 3A4 | Heavy Chain (with wild type human IgG1 constant region) |
| VH3 (N54T*)/VK4 | EVQLVQSGSELKKPGASVKVSCTASGFNIKDDYMYWVRQPPGKGLEWIGWIDPE |
| | TGDTEYASKFQDRVTVTADTSTNTAYMELSSLRSEDTAVYYCTLWLRRGLDYW |
| | GQGTLVTVSSASTKGPSVFPLAPSSKSTSGGTAALGCLVKDYFPEPVTVSWNSGAL |
| | TSGVHTFPAVLQSSGLYSLSSVVTVPSSSLGTQTYICNVNHKPSNTKVDKKVEPKS |
| | CDKTHTCPPCPAPELLGGPSVFLFPPKPKDTLMISRTPEVTCVVVDVSHEDPEVKFN |
| | WYVDGVEVHNAKTKPREEQYNSTYRVVSVLTVLHQDWLNGKEYKCKVSNKALP |
| | APIEKTISKAKGQPREPQVYTLPPSRDELTKNQVSLTCLVKGFYPSDIAVEWESNGQ |
| | PENNYKTTPPVLDSDGSFFLYSKLTVDKSRWQQGNVFSCSVMHEALHNHYTQKSL |
| | SLSPGK (SEQ ID NO: 84) |
| | Light Chain (with kappa light chain constant region) |
| | DIVMTQSPLSLPVTPGEPASISCRSSKSLLHSNGYTYLFWFQQRPGQSPRLLIYRMS |
| | NLASGVPDRFSGSGSGTDFTLKISRVEAEDVGVYYCMQHLEYPFTFGGGTKVEIK |
| | RTVAAPSVFIFPPSDEQLKSGTASVVCLLNNFYPREAKVQWKVDNALQSGNSQES |
| | VTEQDSKDSTYSLSSTLTLSKADYEKHKVYACEVTHQGLSSPVTKSFNRGEC (SEQ |
| | ID NO: 85) |
| 3A4 | Heavy Chain (with wild type human IgG1 constant region) |
| VH3 (N54S*)/VK4 | EVQLVQSGSELKKPGASVKVSCTASGFNIKDDYMYWVRQPPGKGLEWIGWIDPE |
| | SGDTEYASKFQDRVTVTADTSTNTAYMELSSLRSEDTAVYYCTLWLRRGLDYW |
| | GQGTLVTVSSASTKGPSVFPLAPSSKSTSGGTAALGCLVKDYFPEPVTVSWNSGAL |
| | TSGVHTFPAVLQSSGLYSLSSVVTVPSSSLGTQTYICNVNHKPSNTKVDKKVEPKS |
| | CDKTHTCPPCPAPELLGGPSVFLFPPKPKDTLMISRTPEVTCVVVDVSHEDPEVKFN |
| | WYVDGVEVHNAKTKPREEQYNSTYRVVSVLTVLHQDWLNGKEYKCKVSNKALP |
| | APIEKTISKAKGQPREPQVYTLPPSRDELTKNQVSLTCLVKGFYPSDIAVEWESNGQ |
| | PENNYKTTPPVLDSDGSFFLYSKLTVDKSRWQQGNVFSCSVMHEALHNHYTQKSL |
| | SLSPGK (SEQ ID NO: 86) |
| | Light Chain (with kappa light chain constant region) |
| | DIVMTQSPLSLPVTPGEPASISCRSSKSLLHSNGYTYLFWFQQRPGQSPRLLIYRMS |
| | NLASGVPDRFSGSGSGTDFTLKISRVEAEDVGVYYCMQHLEYPFTFGGGTKVEIK |
| | RTVAAPSVFIFPPSDEQLKSGTASVVCLLNNFYPREAKVQWKVDNALQSGNSQES |
| | VTEQDSKDSTYSLSSTLTLSKADYEKHKVYACEVTHQGLSSPVTKSFNRGEC (SEQ |
| | ID NO: 85) |
| 3A4 | Heavy Chain (with wild type human IgG1 constant region) |
| VH3/VK4 | EVQLVQSGSELKKPGASVKVSCTASGFNIKDDYMYWVRQPPGKGLEWIGWIDPE |
| | NGDTEYASKFQDRVTVTADTSTNTAYMELSSLRSEDTAVYYCTLWLRRGLDYW |
| | GQGTLVTVSSASTKGPSVFPLAPSSKSTSGGTAALGCLVKDYFPEPVTVSWNSGAL |
| | TSGVHTFPAVLQSSGLYSLSSVVTVPSSSLGTQTYICNVNHKPSNTKVDKKVEPKS |
| | CDKTHTCPPCPAPELLGGPSVFLFPPKPKDTLMISRTPEVTCVVVDVSHEDPEVKFN |
| | WYVDGVEVHNAKTKPREEQYNSTYRVVSVLTVLHQDWLNGKEYKCKVSNKALP |
| | APIEKTISKAKGQPREPQVYTLPPSRDELTKNQVSLTCLVKGFYPSDIAVEWESNGQ |
| | PENNYKTTPPVLDSDGSFFLYSKLTVDKSRWQQGNVFSCSVMHEALHNHYTQKSL |
| | SLSPGK (SEQ ID NO: 87) |
| | Light Chain (with kappa light chain constant region) |
| | DIVMTQSPLSLPVTPGEPASISCRSSKSLLHSNGYTYLFWFQQRPGQSPRLLIYRMS |
| | NLASGVPDRFSGSGSGTDFTLKISRVEAEDVGVYYCMQHLEYPFTFGGGTKVEIK |
| | RTVAAPSVFIFPPSDEQLKSGTASVVCLLNNFYPREAKVQWKVDNALQSGNSQES |
| | VTEQDSKDSTYSLSSTLTLSKADYEKHKVYACEVTHQGLSSPVTKSFNRGEC (SEQ |
| | ID NO: 85) |
| 3M12 | Heavy Chain (with wild type human IgG1 constant region) |
| VH3/VK2 | QVQLQESGPGLVKPSQTLSLTCSVTGYSITSGYYWNWIRQPPGKGLEWMGYITFD |
| | GANNYNPSLKNRVSISRDTSKNQFSLKLSSVTAEDTATYYCTRSSYDYDVLDYWG |
| | QGTTVTVSSASTKGPSVFPLAPSSKSTSGGTAALGCLVKDYFPEPVTVSWNSGALT |
| | SGVHTFPAVLQSSGLYSLSSVVTVPSSSLGTQTYICNVNHKPSNTKVDKKVEPKSC |
| | DKTHTCPPCPAPELLGGPSVFLFPPKPKDTLMISRTPEVTCVVVDVSHEDPEVKFN |
| | WYVDGVEVHNAKTKPREEQYNSTYRVVSVLTVLHQDWLNGKEYKCKVSNKALP |
| | APIEKTISKAKGQPREPQVYTLPPSRDELTKNQVSLTCLVKGFYPSDIAVEWESNGQ |
| | PENNYKTTPPVLDSDGSFFLYSKLTVDKSRWQQGNVFSCSVMHEALHNHYTQKSL |
| | SLSPGK (SEQ ID NO: 88) |
| | Light Chain (with kappa light chain constant region) |
| | DIQMTQSPSSLSASVGDRVTITCRASQDISNFLNWYQQKPGQPVKLLIYYTSRLHS |
| | GVPSRFSGSGSGTDFTLTISSLQPEDFATYFCQQGHTLPYTFGQGTKLEIKRTVAAP |
| | SVFIFPPSDEQLKSGTASVVCLLNNFYPREAKVQWKVDNALQSGNSQESVTEQDSK |
| | DSTYSLSSTLTLSKADYEKHKVYACEVTHQGLSSPVTKSFNRGEC (SEQ ID NO: 89) |
| 3M12 | Heavy Chain (with wild type human IgG1 constant region) |
| VH3/VK3 | QVQLQESGPGLVKPSQTLSLTCSVTGYSITSGYYWNWIRQPPGKGLEWMGYITFD |
| | GANNYNPSLKNRVSISRDTSKNQFSLKLSSVTAEDTATYYCTRSSYDYDVLDYWG |
| | QGTTVTVSSASTKGPSVFPLAPSSKSTSGGTAALGCLVKDYFPEPVTVSWNSGALT |
| | SGVHTFPAVLQSSGLYSLSSVVTVPSSSLGTQTYICNVNHKPSNTKVDKKVEPKSC |
| | DKTHTCPPCPAPELLGGPSVFLFPPKPKDTLMISRTPEVTCVVVDVSHEDPEVKFN |
| | WYVDGVEVHNAKTKPREEQYNSTYRVVSVLTVLHQDWLNGKEYKCKVSNKALP |
| | APIEKTISKAKGQPREPQVYTLPPSRDELTKNQVSLTCLVKGFYPSDIAVEWESNGQ |
| | PENNYKTTPPVLDSDGSFFLYSKLTVDKSRWQQGNVFSCSVMHEALHNHYTQKSL |
| | SLSPGK (SEQ ID NO: 88) |
| | Light Chain (with kappa light chain constant region) |
| | DIQMTQSPSSLSASVGDRVTITCRASQDISNFLNWYQQKPGQPVKLLIYYTSRLHS |
| | GVPSRFSGSGSGTDFTLTISSLQPEDFATYYCQQGHTLPYTFGQGTKLEIKRTVAA |
| | PSVFIFPPSDEQLKSGTASVVCLLNNFYPREAKVQWKVDNALQSGNSQESVTEQDS |
| | KDSTYSLSSTLTLSKADYEKHKVYACEVTHQGLSSPVTKSFNRGEC (SEQ ID NO: |
| | 90) |
| 3M12 | Heavy Chain (with wild type human IgG1 constant region) |
| VH4/VK2 | QVQLQESGPGLVKPSQTLSLTCTVTGYSITSGYYWNWIRQPPGKGLEWIGYITFDG |
| | ANNYNPSLKNRVSISRDTSKNQFSLKLSSVTAEDTATYYCTRSSYDYDVLDYWGQ |
| | GTTVTVSSASTKGPSVFPLAPSSKSTSGGTAALGCLVKDYFPEPVTVSWNSGALTS |
| | GVHTFPAVLQSSGLYSLSSVVTVPSSSLGTQTYICNVNHKPSNTKVDKKVEPKSCD |
| | KTHTCPPCPAPELLGGPSVFLFPPKPKDTLMISRTPEVTCVVVDVSHEDPEVKFNW |
| | YVDGVEVHNAKTKPREEQYNSTYRVVSVLTVLHQDWLNGKEYKCKVSNKALPA |
| | PIEKTISKAKGQPREPQVYTLPPSRDELTKNQVSLTCLVKGFYPSDIAVEWESNGQP |
| | ENNYKTTPPVLDSDGSFFLYSKLTVDKSRWQQGNVFSCSVMHEALHNHYTQKSLS |
| | LSPGK (SEQ ID NO: 91) |
| | Light Chain (with kappa light chain constant region) |
| | DIQMTQSPSSLSASVGDRVTITCRASQDISNFLNWYQQKPGQPVKLLIYYTSRLHS |
| | GVPSRFSGSGSGTDFTLTISSLQPEDFATYFCQQGHTLPYTFGQGTKLEIKRTVAAP |
| | SVFIFPPSDEQLKSGTASVVCLLNNFYPREAKVQWKVDNALQSGNSQESVTEQDSK |
| | DSTYSLSSTLTLSKADYEKHKVYACEVTHQGLSSPVTKSFNRGEC (SEQ ID NO: 89) |
| 3M12 | Heavy Chain (with wild type human IgG1 constant region) |
| VH4/VK3 | QVQLQESGPGLVKPSQTLSLTCTVTGYSITSGYYWNWIRQPPGKGLEWIGYITFDG |
| | ANNYNPSLKNRVSISRDTSKNQFSLKLSSVTAEDTATYYCTRSSYDYDVLDYWGQ |
| | GTTVTVSSASTKGPSVFPLAPSSKSTSGGTAALGCLVKDYFPEPVTVSWNSGALTS |
| | GVHTFPAVLQSSGLYSLSSVVTVPSSSLGTQTYICNVNHKPSNTKVDKKVEPKSCD |
| | KTHTCPPCPAPELLGGPSVFLFPPKPKDTLMISRTPEVTCVVVDVSHEDPEVKFNW |
| | YVDGVEVHNAKTKPREEQYNSTYRVVSVLTVLHQDWLNGKEYKCKVSNKALPA |
| | PIEKTISKAKGQPREPQVYTLPPSRDELTKNQVSLTCLVKGFYPSDIAVEWESNGQP |
| | ENNYKTTPPVLDSDGSFFLYSKLTVDKSRWQQGNVFSCSVMHEALHNHYTQKSLS |
| | LSPGK (SEQ ID NO: 91) |
| | Light Chain (with kappa light chain constant region) |
| | DIQMTQSPSSLSASVGDRVTITCRASQDISNFLNWYQQKPGQPVKLLIYYTSRLHS |
| | GVPSRFSGSGSGTDFTLTISSLQPEDFATYYCQQGHTLPYTFGQGTKLEIKRTVAA |
| | PSVFIFPPSDEQLKSGTASVVCLLNNFYPREAKVQWKVDNALQSGNSQESVTEQDS |
| | KDSTYSLSSTLTLSKADYEKHKVYACEVTHQGLSSPVTKSFNRGEC (SEQ ID NO: |
| | 90) |
| 5H12 | Heavy Chain (with wild type human IgG1 constant region) |
| VH5 (C33Y*)/VK3 | QVQLVQSGAEVKKPGASVKVSCKASGYSFTDYYINWVRQAPGQGLEWMGWIYP |
| | GSGNTRYSERFKGRVTITRDTSASTAYMELSSLRSEDTAVYYCAREDYYPYHGM |
| | DYWGQGTLVTVSSASTKGPSVFPLAPSSKSTSGGTAALGCLVKDYFPEPVTVSWN |
| | SGALTSGVHTFPAVLQSSGLYSLSSVVTVPSSSLGTQTYICNVNHKPSNTKVDKKV |
| | EPKSCDKTHTCPPCPAPELLGGPSVFLFPPKPKDTLMISRTPEVTCVVVDVSHEDPE |
| | VKFNWYVDGVEVHNAKTKPREEQYNSTYRVVSVLTVLHQDWLNGKEYKCKVSN |
| | KALPAPIEKTISKAKGQPREPQVYTLPPSRDELTKNQVSLTCLVKGFYPSDIAVEWE |
| | SNGQPENNYKTTPPVLDSDGSFFLYSKLTVDKSRWQQGNVFSCSVMHEALHNHYT |
| | QKSLSLSPGK (SEQ ID NO: 92) |
| | Light Chain (with kappa light chain constant region) |
| | DIVLTQSPDSLAVSLGERATINCRASESVDGYDNSFMHWYQQKPGQPPKLLIFRAS |
| | NLESGVPDRFSGSGSRTDFTLTISSLQAEDVAVYYCQQSSEDPWTFGQGTKLEIKR |
| | TVAAPSVFIFPPSDEQLKSGTASVVCLLNNFYPREAKVQWKVDNALQSGNSQESVT |
| | EQDSKDSTYSLSSTLTLSKADYEKHKVYACEVTHQGLSSPVTKSFNRGEC (SEQ ID |
| | NO: 93) |
| 5H12 | Heavy Chain (with wild type human IgG1 constant region) |
| VH5 (C33D*)/VK4 | QVQLVQSGAEVKKPGASVKVSCKASGYSFTDYDINWVRQAPGQGLEWMGWIYP |
| | GSGNTRYSERFKGRVTITRDTSASTAYMELSSLRSEDTAVYYCAREDYYPYHGM |
| | DYWGQGTLVTVSSASTKGPSVFPLAPSSKSTSGGTAALGCLVKDYFPEPVTVSWN |
| | SGALTSGVHTFPAVLQSSGLYSLSSVVTVPSSSLGTQTYICNVNHKPSNTKVDKKV |
| | EPKSCDKTHTCPPCPAPELLGGPSVFLFPPKPKDTLMISRTPEVTCVVVDVSHEDPE |
| | VKFNWYVDGVEVHNAKTKPREEQYNSTYRVVSVLTVLHQDWLNGKEYKCKVSN |
| | KALPAPIEKTISKAKGQPREPQVYTLPPSRDELTKNQVSLTCLVKGFYPSDIAVEWE |
| | SNGQPENNYKTTPPVLDSDGSFFLYSKLTVDKSRWQQGNVFSCSVMHEALHNHYT |
| | QKSLSLSPGK (SEQ ID NO: 94) |
| | Light Chain (with kappa light chain constant region) |
| | DIVMTQSPDSLAVSLGERATINCRASESVDGYDNSFMHWYQQKPGQPPKLLIFRA |
| | SNLESGVPDRFSGSGSGTDFTLTISSLQAEDVAVYYCQQSSEDPWTFGQGTKLEIK |
| | RTVAAPSVFIFPPSDEQLKSGTASVVCLLNNFYPREAKVQWKVDNALQSGNSQES |
| | VTEQDSKDSTYSLSSTLTLSKADYEKHKVYACEVTHQGLSSPVTKSFNRGEC (SEQ |
| | ID NO: 95) |
| 5H12 | Heavy Chain (with wild type human IgG1 constant region) |
| VH5 (C33Y*)/VK4 | QVQLVQSGAEVKKPGASVKVSCKASGYSFTDYYINWVRQAPGQGLEWMGWIYP |
| | GSGNTRYSERFKGRVTITRDTSASTAYMELSSLRSEDTAVYYCAREDYYPYHGM |
| | DYWGQGTLVTVSSASTKGPSVFPLAPSSKSTSGGTAALGCLVKDYFPEPVTVSWN |
| | SGALTSGVHTFPAVLQSSGLYSLSSVVTVPSSSLGTQTYICNVNHKPSNTKVDKKV |
| | EPKSCDKTHTCPPCPAPELLGGPSVFLFPPKPKDTLMISRTPEVTCVVVDVSHEDPE |
| | VKFNWYVDGVEVHNAKTKPREEQYNSTYRVVSVLTVLHQDWLNGKEYKCKVSN |
| | KALPAPIEKTISKAKGQPREPQVYTLPPSRDELTKNQVSLTCLVKGFYPSDIAVEWE |
| | SNGQPENNYKTTPPVLDSDGSFFLYSKLTVDKSRWQQGNVFSCSVMHEALHNHYT |
| | QKSLSLSPGK (SEQ ID NO: 92) |
| | Light Chain (with kappa light chain constant region) |
| | DIVMTQSPDSLAVSLGERATINCRASESVDGYDNSFMHWYQQKPGQPPKLLIFRA |
| | SNLESGVPDRFSGSGSGTDFTLTISSLQAEDVAVYYCQQSSEDPWTFGQGTKLEIK |
| | RTVAAPSVFIFPPSDEQLKSGTASVVCLLNNFYPREAKVQWKVDNALQSGNSQES |
| | VTEQDSKDSTYSLSSTLTLSKADYEKHKVYACEVTHQGLSSPVTKSFNRGEC (SEQ |
| | ID NO: 95) |
| Anti-TfR clone 8 | VH: |
| | QVQLVQSGAEVKKPGESLKISCKGSGYSFTSYWIGWVRQMPGKGLEWMGIIYPG |
| | DSDTRYSPSFQGQVTISADKSISTAYLQWSSLKASDTAMYYCARFPYDSSGYYSF |
| | DYWGQGTLVTVSSASTKGPSVFPLAPSSKSTSGGTAALGCLVKDYFPEPVTVSWN |
| | SGALTSGVHTFPAVLQSSGLYSLSSVVTVPSSSLGTQTYICNVNHKPSNTKVDKKV |
| | EPKSCDKTHTCPPCPAPELLGGPSVFLFPPKPKDTLMISRTPEVTCVVVDVSHEDPE |
| | VKFNWYVDGVEVHNAKTKPREEQYNSTYRVVSVLTVLHQDWLNGKEYKCKVSN |
| | KALPAPIEKTISKAKGQPREPQVYTLPPSRDELTKNQVSLTCLVKGFYPSDIAVEWE |
| | SNGQPENNYKTTPPVLDSDGSFFLYSKLTVDKSRWQQGNVFSCSVMHEALHNHYT |
| | QKSLSLSPGK (SEQ ID NO: 156) |
| | VL: |
| | DIQMTQSPSSLSASVGDRVTITCRASQSISSYLNWYQQKPGKAPKLLIYAASSLQS |
| | GVPSRFSGSGSGTDFTLTISSLQPEDFATYYCQQSYSTPLTFGGGTKVEIKRTVAAP |
| | SVFIFPPSDEQLKSGTASVVCLLNNFYPREAKVQWKVDNALQSGNSQESVTEQDSK |
| | DSTYSLSSTLTLSKADYEKHKVYACEVTHQGLSSPVTKSFNRGEC (SEQ ID NO: |
| | 157) |

*mutation positions are according to Kabat numbering of the respective VH sequences containing the mutations
**CDRs according to the Kabat numbering system are bolded; VH/VL sequences underlined

[0162] In some embodiments, the anti-TfR1 antibody of the present disclosure comprises a heavy chain containing no more than 25 amino acid variations (e.g., no more than 25, 24, 23, 22, 21, 20, 19, 18, 17, 16, 15, 14, 13, 12, 11, 10, 9, 8, 7, 6, 5, 4, 3, 2, or 1 amino acid variation) as compared with the heavy chain as set forth in any one of SEQ ID NOs: 84, 86, 87, 88, 91, 92, 94, and 156. Alternatively or in addition (e.g., in addition), the anti-TfR1 antibody of the present disclosure comprises a light chain containing no more than 25 amino acid variations (e.g., no more than 25, 24, 23, 22, 21, 20, 19, 18, 17, 16, 15, 14, 13, 12, 11, 10, 9, 8, 7, 6, 5, 4, 3, 2, or 1 amino acid variation) as compared with the light chain as set forth in any one of SEQ ID NOs: 85, 89, 90, 93, 95, and 157.

[0163] In some embodiments, the anti-TfR1 antibody described herein comprises a heavy chain comprising an amino acid sequence that is at least 75% (e.g., 75%, 80%, 85%, 90%, 95%, 98%, or 99%) identical to any one of SEQ ID NOs: 84, 86, 87, 88, 91, 92, 94, and 156. Alternatively or in addition (e.g., in addition), the anti-TfR1 antibody described herein comprises a light chain comprising an amino acid sequence that is at least 75% (e.g., 75%, 80%, 85%, 90%, 95%, 98%, or 99%) identical to any one of SEQ ID NOs: 85, 89, 90, 93, 95, and 157. In some embodiments, the anti-TfR1 antibody described herein comprises a heavy chain comprising the amino acid sequence of any one of SEQ ID NOs: 84, 86, 87, 88, 91, 92, 94, and 156. Alternatively or in addition (e.g., in addition), the anti-TfR1 antibody described herein comprises a light chain comprising the amino acid sequence of any one of SEQ ID NOs: 85, 89, 90, 93, 95 and 157.

[0164] In some embodiments, the anti-TfR1 antibody of the present disclosure comprises a heavy chain comprising the amino acid sequence of SEQ ID NO: 84 and a light chain comprising the amino acid sequence of SEQ ID NO: 85.

[0165] In some embodiments, the anti-TfR1 antibody of the present disclosure comprises a heavy chain comprising the amino acid sequence of SEQ ID NO: 86 and a light chain comprising the amino acid sequence of SEQ ID NO: 85.

[0166] In some embodiments, the anti-TfR1 antibody of the present disclosure comprises a heavy chain comprising the amino acid sequence of SEQ ID NO: 87 and a light chain comprising the amino acid sequence of SEQ ID NO: 85.

[0167] In some embodiments, the anti-TfR1 antibody of the present disclosure comprises a heavy chain comprising the amino acid sequence of SEQ ID NO: 88 and a light chain comprising the amino acid sequence of SEQ ID NO: 89.

[0168] In some embodiments, the anti-TfR1 antibody of the present disclosure comprises a heavy chain comprising the amino acid sequence of SEQ ID NO: 88 and a light chain comprising the amino acid sequence of SEQ ID NO: 90.

[0169] In some embodiments, the anti-TfR1 antibody of the present disclosure comprises a heavy chain comprising the amino acid sequence of SEQ ID NO: 91 and a light chain comprising the amino acid sequence of SEQ ID NO: 89.

[0170] In some embodiments, the anti-TfR1 antibody of the present disclosure comprises a heavy chain comprising the amino acid sequence of SEQ ID NO: 91 and a light chain comprising the amino acid sequence of SEQ ID NO: 90.

[0171] In some embodiments, the anti-TfR1 antibody of the present disclosure comprises a heavy chain comprising the amino acid sequence of SEQ ID NO: 92 and a light chain comprising the amino acid sequence of SEQ ID NO: 93.

[0172] In some embodiments, the anti-TfR1 antibody of the present disclosure comprises a heavy chain comprising the amino acid sequence of SEQ ID NO: 94 and a light chain comprising the amino acid sequence of SEQ ID NO: 95.

[0173] In some embodiments, the anti-TfR1 antibody of the present disclosure comprises a heavy chain comprising the amino acid sequence of SEQ ID NO: 92 and a light chain comprising the amino acid sequence of SEQ ID NO: 95.

[0174] In some embodiments, the anti-TfR1 antibody of the present disclosure comprises a heavy chain comprising the amino acid sequence of SEQ ID NO: 156 and a light chain comprising the amino acid sequence of SEQ ID NO: 157.

[0175] In some embodiments, the anti-TfR1 antibody is a Fab fragment, Fab′ fragment, or F(ab′)₂ fragment of an intact antibody (full-length antibody). Antigen binding fragment of an intact antibody (full-length antibody) can be prepared via routine methods (e.g., recombinantly or by digesting the heavy chain constant region of a full-length IgG using an enzyme such as papain). For example, F(ab′)₂ fragments can be produced by pepsin or papain digestion of an antibody molecule, and Fab fragments that can be generated by reducing the disulfide bridges of F(ab′)₂ fragments. In some embodiments, a heavy chain constant region in a Fab fragment of the anti-TfR1 antibody described herein comprises the amino acid sequence of:

(SEQ ID NO: 96)
ASTKGPSVFPLAPSSKSTSGGTAALGCLVKDYFPEPVTVSWNSGALTSG
VHTFPAVLQSSGLYSLSSVVTVPSSSLGTQTYICNVNHKPSNTKVDKKV
EPKSCDKTHT

[0176] In some embodiments, the anti-TfR1 antibody described herein comprises a heavy chain comprising any one of the VH as listed in Table 3 or any variants thereof and a heavy chain constant region that is at least 80%, at least 85%, at least 90%, at least 95%, or at least 99% identical to SEQ ID NO: 96. In some embodiments, the anti-TfR1 antibody described herein comprises a heavy chain comprising any one of the VH as listed in Table 3 or any variants thereof and a heavy chain constant region that contains no more than 25 amino acid variations (e.g., no more than 25, 24, 23, 22, 21, 20, 19, 18, 17, 16, 15, 14, 13, 12, 11, 10, 9, 8, 7, 6, 5, 4, 3, 2, or 1 amino acid variation) as compared with SEQ ID NO: 96. In some embodiments, the anti-TfR1 antibody described herein comprises a heavy chain comprising any one of the VH as listed in Table 3 or any variants thereof and a heavy chain constant region as set forth in SEQ ID NO: 96.

[0177] In some embodiments, the anti-TfR1 antibody described herein comprises a light chain comprising any one of the VL as listed in Table 3 or any variants thereof and a light chain constant region that is at least 80%, at least 85%, at least 90%, at least 95%, or at least 99% identical to SEQ ID NO: 83. In some embodiments, the anti-TfR1 antibody described herein comprises a light chain comprising any one of the VL as listed in Table 3 or any variants thereof and a light chain constant region contains no more than 25 amino acid variations (e.g., no more than 25, 24, 23, 22, 21, 20, 19, 18, 17, 16, 15, 14, 13, 12, 11, 10, 9, 8, 7, 6, 5, 4, 3, 2, or 1 amino acid variation) as compared with SEQ ID NO: 83. In some embodiments, the anti-TfR1 antibody described herein comprises a light chain comprising any one of the VL as listed in Table 3 or any variants thereof and a light chain constant region set forth in SEQ ID NO: 83.

[0178] Examples of Fab heavy chain and light chain amino acid sequences of the anti-TfR1 antibodies described are provided in Table 5 below.

TABLE 5
Heavy chain and light chain sequences of examples of anti-TfR1 Fabs

| Antibody | Fab Heavy Chain/Light Chain Sequences** |
|---|---|
| 3A4 | Heavy Chain (with partial human IgG1 constant region) |
| VH3 (N54T*)/VK4 | EVQLVQSGSELKKPGASVKVSCTASGFNIKDDYMYWVRQPPGKGLEWIGWIDPE |
| | TGDTEYASKFQDRVTVTADTSTNTAYMELSSLRSEDTAVYYCTLWLRRGLDYW |
| | GQGTLVTVSSASTKGPSVFPLAPSSKSTSGGTAALGCLVKDYFPEPVTVSWNSGAL |
| | TSGVHTFPAVLQSSGLYSLSSVVTVPSSSLGTQTYICNVNHKPSNTKVDKKVEPKS |
| | CDKTHT (SEQ ID NO: 97) |
| | Light Chain (with kappa light chain constant region) |
| | DIVMTQSPLSLPVTPGEPASISCRSSKSLLHSNGYTYLFWFQQRPGQSPRLLIYRMS |
| | NLASGVPDRFSGSGSGTDFTLKISRVEAEDVGVYYCMQHLEYPFTFGGGTKVEIK |
| | RTVAAPSVFIFPPSDEQLKSGTASVVCLLNNFYPREAKVQWKVDNALQSGNSQES |
| | VTEQDSKDSTYSLSSTLTLSKADYEKHKVYACEVTHQGLSSPVTKSFNRGEC (SEQ |
| | ID NO: 85) |
| 3A4 | Heavy Chain (with partial human IgG1 constant region) |
| VH3 (N54S*)/VK4 | EVQLVQSGSELKKPGASVKVSCTASGFNIKDDYMYWVRQPPGKGLEWIGWIDPE |
| | SGDTEYASKFQDRVTVTADTSTNTAYMELSSLRSEDTAVYYCTLWLRRGLDYW |
| | GQGTLVTVSSASTKGPSVFPLAPSSKSTSGGTAALGCLVKDYFPEPVTVSWNSGAL |
| | TSGVHTFPAVLQSSGLYSLSSVVTVPSSSLGTQTYICNVNHKPSNTKVDKKVEPKS |
| | CDKTHT (SEQ ID NO: 98) |
| | Light Chain (with kappa light chain constant region) |
| | DIVMTQSPLSLPVTPGEPASISCRSSKSLLHSNGYTYLFWFQQRPGQSPRLLIYRMS |
| | NLASGVPDRFSGSGSGTDFTLKISRVEAEDVGVYYCMQHLEYPFTFGGGTKVEIK |
| | RTVAAPSVFIFPPSDEQLKSGTASVVCLLNNFYPREAKVQWKVDNALQSGNSQES |
| | VTEQDSKDSTYSLSSTLTLSKADYEKHKVYACEVTHQGLSSPVTKSFNRGEC (SEQ |
| | ID NO: 85) |
| 3A4 | Heavy Chain (with partial human IgG1 constant region) |
| VH3/VK4 | EVQLVQSGSELKKPGASVKVSCTASGFNIKDDYMYWVRQPPGKGLEWIGWIDPE |
| | NGDTEYASKFQDRVTVTADTSTNTAYMELSSLRSEDTAVYYCTLWLRRGLDYW |
| | GQGTLVTVSSASTKGPSVFPLAPSSKSTSGGTAALGCLVKDYFPEPVTVSWNSGAL |
| | TSGVHTFPAVLQSSGLYSLSSVVTVPSSSLGTQTYICNVNHKPSNTKVDKKVEPKS |
| | CDKTHT (SEQ ID NO: 99) |
| | Light Chain (with kappa light chain constant region) |
| | DIVMTQSPLSLPVTPGEPASISCRSSKSLLHSNGYTYLFWFQQRPGQSPRLLIYRMS |
| | NLASGVPDRFSGSGSGTDFTLKISRVEAEDVGVYYCMQHLEYPFTFGGGTKVEIK |
| | RTVAAPSVFIFPPSDEQLKSGTASVVCLLNNFYPREAKVQWKVDNALQSGNSQES |
| | VTEQDSKDSTYSLSSTLTLSKADYEKHKVYACEVTHQGLSSPVTKSFNRGEC (SEQ |
| | ID NO: 85) |
| 3M12 | Heavy Chain (with partial human IgG1 constant region) |
| VH3/VK2 | QVQLQESGPGLVKPSQTLSLTCSVTGYSITSGYYWNWIRQPPGKGLEWMGYITFD |
| | GANNYNPSLKNRVSISRDTSKNQFSLKLSSVTAEDTATYYCTRSSYDYDVLDYWG |
| | QGTTVTVSSASTKGPSVFPLAPSSKSTSGGTAALGCLVKDYFPEPVTVSWNSGALT |
| | SGVHTFPAVLQSSGLYSLSSVVTVPSSSLGTQTYICNVNHKPSNTKVDKKVEPKSC |
| | DKTHT (SEQ ID NO: 100) |
| | Light Chain (with kappa light chain constant region) |
| | DIQMTQSPSSLSASVGDRVTITCRASQDISNFLNWYQQKPGQPVKLLIYYTSRLHS |
| | GVPSRFSGSGSGTDFTLTISSLQPEDFATYFCQQGHTLPYTFGQGTKLEIKRTVAAP |
| | SVFIFPPSDEQLKSGTASVVCLLNNFYPREAKVQWKVDNALQSGNSQESVTEQDSK |
| | DSTYSLSSTLTLSKADYEKHKVYACEVTHQGLSSPVTKSFNRGEC (SEQ ID NO: 89) |
| 3M12 | Heavy Chain (with partial human IgG1 constant region) |
| VH3/VK3 | QVQLQESGPGLVKPSQTLSLTCSVTGYSITSGYYWNWIRQPPGKGLEWMGYITFD |
| | GANNYNPSLKNRVSISRDTSKNQFSLKLSSVTAEDTATYYCTRSSYDYDVLDYWG |
| | QGTTVTVSSASTKGPSVFPLAPSSKSTSGGTAALGCLVKDYFPEPVTVSWNSGALT |
| | SGVHTFPAVLQSSGLYSLSSVVTVPSSSLGTQTYICNVNHKPSNTKVDKKVEPKSC |
| | DKTHT (SEQ ID NO: 100) |
| | Light Chain (with kappa light chain constant region) |
| | DIQMTQSPSSLSASVGDRVTITCRASQDISNFLNWYQQKPGQPVKLLIYYTSRLHS |
| | GVPSRFSGSGSGTDFTLTISSLQPEDFATYYCQQGHTLPYTFGQGTKLEIKRTVAA |
| | PSVFIFPPSDEQLKSGTASVVCLLNNFYPREAKVQWKVDNALQSGNSQESVTEQDS |
| | KDSTYSLSSTLTLSKADYEKHKVYACEVTHQGLSSPVTKSFNRGEC (SEQ ID NO: |
| | 90) |
| 3M12 | Heavy Chain (with partial human IgG1 constant region) |
| VH4/VK2 | QVQLQESGPGLVKPSQTLSLTCTVTGYSITSGYYWNWIRQPPGKGLEWIGYITEDG |
| | ANNYNPSLKNRVSISRDTSKNQFSLKLSSVTAEDTATYYCTRSSYDYDVLDYWGQ |
| | GTTVTVSSASTKGPSVFPLAPSSKSTSGGTAALGCLVKDYFPEPVTVSWNSGALTS |
| | GVHTFPAVLQSSGLYSLSSVVTVPSSSLGTQTYICNVNHKPSNTKVDKKVEPKSCD |
| | KTHT (SEQ ID NO: 101) |
| | Light Chain (with kappa light chain constant region) |
| | DIQMTQSPSSLSASVGDRVTITCRASQDISNFLNWYQQKPGQPVKLLIYYTSRLHS |
| | GVPSRFSGSGSGTDFTLTISSLQPEDFATYFCQQGHTLPYTFGQGTKLEIKRTVAAP |
| | SVFIFPPSDEQLKSGTASVVCLLNNFYPREAKVQWKVDNALQSGNSQESVTEQDSK |
| | DSTYSLSSTLTLSKADYEKHKVYACEVTHQGLSSPVTKSFNRGEC (SEQ ID NO: 89) |
| 3M12 | Heavy Chain (with partial human IgG1 constant region) |
| VH4/VK3 | QVQLQESGPGLVKPSQTLSLTCTVTGYSITSGYYWNWIRQPPGKGLEWIGYITEDG |
| | ANNYNPSLKNRVSISRDTSKNQFSLKLSSVTAEDTATYYCTRSSYDYDVLDYWGQ |
| | GTTVTVSSASTKGPSVFPLAPSSKSTSGGTAALGCLVKDYFPEPVTVSWNSGALTS |
| | GVHTFPAVLQSSGLYSLSSVVTVPSSSLGTQTYICNVNHKPSNTKVDKKVEPKSCD |
| | KTHT (SEQ ID NO: 101) |
| | Light Chain (with kappa light chain constant region) |
| | DIQMTQSPSSLSASVGDRVTITCRASQDISNFLNWYQQKPGQPVKLLIYYTSRLHS |
| | GVPSRFSGSGSGTDFTLTISSLQPEDFATYYCQQGHTLPYTFGQGTKLEIKRTVAA |
| | PSVFIFPPSDEQLKSGTASVVCLLNNFYPREAKVQWKVDNALQSGNSQESVTEQDS |
| | KDSTYSLSSTLTLSKADYEKHKVYACEVTHQGLSSPVTKSFNRGEC (SEQ ID NO: |
| | 90) |
| 5H12 | Heavy Chain (with partial human IgG1 constant region) |
| VH5 (C33Y*)/VK3 | QVQLVQSGAEVKKPGASVKVSCKASGYSFTDYYINWVRQAPGQGLEWMGWIYP |
| | GSGNTRYSERFKGRVTITRDTSASTAYMELSSLRSEDTAVYYCAREDYYPYHGM |
| | DYWGQGTLVTVSSASTKGPSVFPLAPSSKSTSGGTAALGCLVKDYFPEPVTVSWN |
| | SGALTSGVHTFPAVLQSSGLYSLSSVVTVPSSSLGTQTYICNVNHKPSNTKVDKKV |
| | EPKSCDKTHT (SEQ ID NO: 102) |
| | Light Chain (with kappa light chain constant region) |
| | DIVLTQSPDSLAVSLGERATINCRASESVDGYDNSFMHWYQQKPGQPPKLLIFRAS |
| | NLESGVPDRFSGSGSRTDFTLTISSLQAEDVAVYYCQQSSEDPWTFGQGTKLEIKR |
| | TVAAPSVFIFPPSDEQLKSGTASVVCLLNNFYPREAKVQWKVDNALQSGNSQESVT |
| | EQDSKDSTYSLSSTLTLSKADYEKHKVYACEVTHQGLSSPVTKSFNRGEC (SEQ ID |
| | NO: 93) |
| 5H12 | Heavy Chain (with partial human IgG1 constant region) |
| VH5 (C33D*)/VK4 | QVQLVQSGAEVKKPGASVKVSCKASGYSFTDYDINWVRQAPGQGLEWMGWIYP |
| | GSGNTRYSERFKGRVTITRDTSASTAYMELSSLRSEDTAVYYCAREDYYPYHGM |
| | DYWGQGTLVTVSSASTKGPSVFPLAPSSKSTSGGTAALGCLVKDYFPEPVTVSWN |
| | SGALTSGVHTFPAVLQSSGLYSLSSVVTVPSSSLGTQTYICNVNHKPSNTKVDKKV |
| | EPKSCDKTHT (SEQ ID NO: 103) |
| | Light Chain (with kappa light chain constant region) |
| | DIVMTQSPDSLAVSLGERATINCRASESVDGYDNSFMHWYQQKPGQPPKLLIFRA |
| | SNLESGVPDRFSGSGSGTDFTLTISSLQAEDVAVYYCQQSSEDPWTFGQGTKLEIK |
| | RTVAAPSVFIFPPSDEQLKSGTASVVCLLNNFYPREAKVQWKVDNALQSGNSQES |
| | VTEQDSKDSTYSLSSTLTLSKADYEKHKVYACEVTHQGLSSPVTKSFNRGEC (SEQ |
| | ID NO: 95) |
| 5H12 | Heavy Chain (with partial human IgG1 constant region) |
| VH5 (C33Y*)/VK4 | QVQLVQSGAEVKKPGASVKVSCKASGYSFTDYYINWVRQAPGQGLEWMGWIYP |
| | GSGNTRYSERFKGRVTITRDTSASTAYMELSSLRSEDTAVYYCAREDYYPYHGM |
| | DYWGQGTLVTVSSASTKGPSVFPLAPSSKSTSGGTAALGCLVKDYFPEPVTVSWN |
| | SGALTSGVHTFPAVLQSSGLYSLSSVVTVPSSSLGTQTYICNVNHKPSNTKVDKKV |
| | EPKSCDKTHT (SEQ ID NO: 102) |
| | Light Chain (with kappa light chain constant region) |
| | DIVMTQSPDSLAVSLGERATINCRASESVDGYDNSFMHWYQQKPGQPPKLLIFRA |
| | SNLESGVPDRFSGSGSGTDFTLTISSLQAEDVAVYYCQQSSEDPWTFGQGTKLEIK |
| | RTVAAPSVFIFPPSDEQLKSGTASVVCLLNNFYPREAKVQWKVDNALQSGNSQES |
| | VTEQDSKDSTYSLSSTLTLSKADYEKHKVYACEVTHQGLSSPVTKSFNRGEC (SEQ |
| | ID NO: 95) |
| Anti-TfR clone 8 | VH: |
| Version 1 | QVQLVQSGAEVKKPGESLKISCKGSGYSFTSYWIGWVRQMPGKGLEWMGIIYPG |
| | DSDTRYSPSFQGQVTISADKSISTAYLQWSSLKASDTAMYYCARFPYDSSGYYSF |
| | DYWGQGTLVTVSSASTKGPSVFPLAPSSKSTSGGTAALGCLVKDYFPEPVTVSWN |
| | SGALTSGVHTFPAVLQSSGLYSLSSVVTVPSSSLGTQTYICNVNHKPSNTKVDKKV |
| | EPKSCDKTHTCP (SEQ ID NO: 158) |
| | VL: |
| | DIQMTQSPSSLSASVGDRVTITCRASQSISSYLNWYQQKPGKAPKLLIYAASSLQS |
| | GVPSRFSGSGSGTDFTLTISSLQPEDFATYYCQQSYSTPLTFGGGTKVEIKRTVAAP |
| | SVFIFPPSDEQLKSGTASVVCLLNNFYPREAKVQWKVDNALQSGNSQESVTEQDSK |
| | DSTYSLSSTLTLSKADYEKHKVYACEVTHQGLSSPVTKSFNRGEC (SEQ ID NO: |
| | 157) |
| Anti-TfR clone 8 | VH: |
| Version 2 | QVQLVQSGAEVKKPGESLKISCKGSGYSFTSYWIGWVRQMPGKGLEWMGIIYPG |
| | DSDTRYSPSFQGQVTISADKSISTAYLQWSSLKASDTAMYYCARFPYDSSGYYSF |
| | DYWGQGTLVTVSSASTKGPSVFPLAPSSKSTSGGTAALGCLVKDYFPEPVTVSWN |
| | SGALTSGVHTFPAVLQSSGLYSLSSVVTVPSSSLGTQTYICNVNHKPSNTKVDKKV |
| | EPKSCDKTHT (SEQ ID NO: 159) |
| | VL: |
| | DIQMTQSPSSLSASVGDRVTITCRASQSISSYLNWYQQKPGKAPKLLIYAASSLQS |
| | GVPSRFSGSGSGTDFTLTISSLQPEDFATYYCQQSYSTPLTFGGGTKVEIKRTVAAP |
| | SVFIFPPSDEQLKSGTASVVCLLNNFYPREAKVQWKVDNALQSGNSQESVTEQDSK |
| | DSTYSLSSTLTLSKADYEKHKVYACEVTHQGLSSPVTKSFNRGEC (SEQ ID NO: |
| | 157) |

*mutation positions are according to Kabat numbering of the respective VH sequences containing the mutations
**CDRs according to the Kabat numbering system are bolded; VH/VL sequences underlined

[0179] In some embodiments, the anti-TfR1 antibody of the present disclosure comprises a heavy chain containing no more than 25 amino acid variations (e.g., no more than 25, 24, 23, 22, 21, 20, 19, 18, 17, 16, 15, 14, 13, 12, 11, 10, 9, 8, 7, 6, 5, 4, 3, 2, or 1 amino acid variation) as compared with the heavy chain as set forth in any one of SEQ ID NOs: 97-103, 158 and 159. Alternatively or in addition (e.g., in addition), the anti-TfR1 antibody of the present disclosure comprises a light chain containing no more than 25 amino acid variations (e.g., no more than 25, 24, 23, 22, 21, 20, 19, 18, 17, 16, 15, 14, 13, 12, 11, 10, 9, 8, 7, 6, 5, 4, 3, 2, or 1 amino acid variation) as compared with the light chain as set forth in any one of SEQ ID NOs: 85, 89, 90, 93, 95, and 157.

[0180] In some embodiments, the anti-TfR1 antibody described herein comprises a heavy chain comprising an amino acid sequence that is at least 75% (e.g., 75%, 80%, 85%, 90%, 95%, 98%, or 99%) identical to any one of SEQ ID NOs: 97-103, 158 and 159. Alternatively or in addition (e.g., in addition), the anti-TfR1 antibody described herein comprises a light chain comprising an amino acid sequence that is at least 75% (e.g., 75%, 80%, 85%, 90%, 95%, 98%, or 99%) identical to any one of SEQ ID NOs: 85, 89, 90, 93, 95, and 157. In some embodiments, the anti-TfR1 antibody described herein comprises a heavy chain comprising the amino acid sequence of any one of SEQ ID NOs: 97-103, 158 and 159. Alternatively or in addition (e.g., in addition), the anti-TfR1 antibody described herein comprises a light chain comprising the amino acid sequence of any one of SEQ ID NOs: 85, 89, 90, 93, 95, and 157.

[0181] In some embodiments, the anti-TfR1 antibody of the present disclosure comprises a heavy chain comprising the amino acid sequence of SEQ ID NO: 97 and a light chain comprising the amino acid sequence of SEQ ID NO: 85.

[0182] In some embodiments, the anti-TfR1 antibody of the present disclosure comprises a heavy chain comprising the amino acid sequence of SEQ ID NO: 98 and a light chain comprising the amino acid sequence of SEQ ID NO: 85.

[0183] In some embodiments, the anti-TfR1 antibody of the present disclosure comprises a heavy chain comprising the amino acid sequence of SEQ ID NO: 99 and a light chain comprising the amino acid sequence of SEQ ID NO: 85.

[0184] In some embodiments, the anti-TfR1 antibody of the present disclosure comprises a heavy chain comprising the amino acid sequence of SEQ ID NO: 100 and a light chain comprising the amino acid sequence of SEQ ID NO: 89.

[0185] In some embodiments, the anti-TfR1 antibody of the present disclosure comprises a heavy chain comprising the amino acid sequence of SEQ ID NO: 100 and a light chain comprising the amino acid sequence of SEQ ID NO: 90.

[0186] In some embodiments, the anti-TfR1 antibody of the present disclosure comprises a heavy chain comprising the amino acid sequence of SEQ ID NO: 101 and a light chain comprising the amino acid sequence of SEQ ID NO: 89.

[0187] In some embodiments, the anti-TfR1 antibody of the present disclosure comprises a heavy chain comprising the amino acid sequence of SEQ ID NO: 101 and a light chain comprising the amino acid sequence of SEQ ID NO: 90.

[0188] In some embodiments, the anti-TfR1 antibody of the present disclosure comprises a heavy chain comprising the amino acid sequence of SEQ ID NO: 102 and a light chain comprising the amino acid sequence of SEQ ID NO: 93.

[0189] In some embodiments, the anti-TfR1 antibody of the present disclosure comprises a heavy chain comprising the amino acid sequence of SEQ ID NO: 103 and a light chain comprising the amino acid sequence of SEQ ID NO: 95.

[0190] In some embodiments, the anti-TfR1 antibody of the present disclosure comprises a heavy chain comprising the amino acid sequence of SEQ ID NO: 102 and a light chain comprising the amino acid sequence of SEQ ID NO: 95.

[0191] In some embodiments, the anti-TfR1 antibody of the present disclosure comprises a heavy chain comprising the amino acid sequence of SEQ ID NO: 158 and a light chain comprising the amino acid sequence of SEQ ID NO: 157.

[0192] In some embodiments, the anti-TfR1 antibody of the present disclosure comprises a heavy chain comprising the amino acid sequence of SEQ ID NO: 159 and a light chain comprising the amino acid sequence of SEQ ID NO: 157.

### Other Known Anti-TfR1 Antibodies

[0193] Any other appropriate anti-TfR1 antibodies known in the art may be used as the muscle-targeting agent in the complexes disclosed herein. Examples of known anti-TfR1 antibodies, including associated references and binding epitopes, are listed in Table 6. In some embodiments, the anti-TfR1 antibody comprises the complementarity determining regions (CDR-H1, CDR-H2, CDR-H3, CDR-L1, CDR-L2, and CDR-L3) of any of the anti-TfR1 antibodies provided herein, e.g., anti-TfR1 antibodies listed in Table 6.

TABLE 6
List of anti-TfR1 antibody clones, including associated
references and binding epitope information.

| Antibody Clone | | |
|---|---|---|
| Name | Reference(s) | Epitope/Notes |
| OKT9 | U.S. Pat. No. 4,364,934, filed Dec. 4, 1979, | Apical domain of TfR1 |
| | entitled “MONOCLONAL ANTIBODY TO | (residues 305-366 of |
| | A HUMAN EARLY THYMOCYTE | human TfR1 sequence |
| | ANTIGEN AND METHODS FOR | XM_052730.3, available |
| | PREPARING SAME” | in GenBank) |
| | Schneider C. et al. “Structural features of the | |
| | cell surface receptor for transferrin that is | |
| | recognized by the monoclonal antibody | |
| | OKT9.” J Biol Chem. 1982, 257: 14, 8516- | |
| | 8522. | |
| (From JCR) | WO 2015/098989, filed Dec. 24, 2014, | Apical domain (residues |
| Clone M11 | “Novel anti-Transferrin receptor antibody | 230-244 and 326-347 of |
| Clone M23 | that passes through blood-brain barrier” | TfR1) and protease-like |
| Clone M27 | U.S. Pat. No. 9,994,641, filed | domain (residues 461- |
| Clone B84 | Dec. 24, 2014, “Novel anti-Transferrin | 473) |
| | receptor antibody that passes through | |
| | blood-brain barrier” | |
| (From | WO 2016/081643, filed May 26, 2016, | Apical domain and non- |
| Genentech) | entitled “ANTI-TRANSFERRIN | apical regions |
| 7A4, 8A2, 15D2, | RECEPTOR ANTIBODIES AND | |
| 10D11, 7B10, | METHODS OF USE” | |
| 15G11, 16G5, | U.S. Pat. No. 9,708,406, filed | |
| 13C3, 16G4, | May 20, 2014, “Anti-transferrin receptor | |
| 16F6, 7G7, 4C2, | antibodies and methods of use” | |
| 1B12, and 13D4 | | |
| (From Armagen) | Lee et al. “Targeting Rat Anti-Mouse | |
| 8D3 | Transferrin Receptor Monoclonal Antibodies | |
| | through Blood-Brain Barrier in Mouse” | |
| | 2000, J Pharmacol. Exp. Ther., 292: 1048- | |
| | 1052. | |
| | US Patent App. 2010/077498, filed | |
| | Sep. 11, 2008, entitled “COMPOSITIONS AND | |
| | METHODS FOR BLOOD-BRAIN | |
| | BARRIER DELIVERY IN THE MOUSE” | |
| OX26 | Haobam, B. et al. 2014. Rab17- | |
| | mediated recycling endosomes contribute to | |
| | autophagosome formation in response to | |
| | Group A Streptococcus invasion. Cellular | |
| | microbiology. 16: 1806-21. | |
| DF1513 | Ortiz-Zapater E et al. Trafficking of | |
| | the human transferrin receptor in plant cells: | |
| | effects of tyrphostin A23 and brefeldin A. | |
| | Plant J 48: 757-70 (2006). | |
| 1A1B2, 66IG10, | Commercially available anti- | Novus Biologicals |
| MEM-189, | transferrin receptor antibodies. | 8100 Southpark Way, A- |
| JF0956, 29806, | | 8 Littleton CO 80120 |
| 1A1B2, | | |
| TFRC/1818, | | |
| 1E6, 66Ig10, | | |
| TFRC/1059, | | |
| Q1/71, 23D10, | | |
| 13E4, | | |
| TFRC/1149, | | |
| ER-MP21, | | |
| YTA74.4, BU54, | | |
| 2B6, RI7 217 | | |
| (From INSERM) | US Patent App. 2011/0311544A1, | Does not compete with |
| BA120g | filed Jun. 15, 2005, entitled “ANTI-CD71 | OKT9 |
| | MONOCLONAL ANTIBODIES AND | |
| | USES THEREOF FOR TREATING | |
| | MALIGNANT TUMOR CELLS” | |
| LUCA31 | U.S. Pat. No. 7,572,895, filed | “LUCA31 epitope” |
| | Jun. 7, 2004, entitled “TRANSFERRIN | |
| | RECEPTOR ANTIBODIES” | |
| (Salk Institute) | Trowbridge, I. S. et al. “Anti-transferrin | |
| B3/25 | receptor monoclonal antibody and toxin- | |
| T58/30 | antibody conjugates affect growth of | |
| | human tumour cells.” Nature, 1981, | |
| | volume 294, pages 171-173 | |
| R17 217.1.3, | Commercially available anti- | BioXcell |
| 5E9C11, | transferrin receptor antibodies. | 10 Technology Dr., |
| OKT9 (BE0023 | | Suite 2B |
| clone) | | West Lebanon, NH |
| | | 03784-1671 USA |
| BK19.9, B3/25, | Gatter, K. C. et al. “Transferrin receptors | |
| T56/14 and | in human tissues: their distribution and | |
| T58/1 | possible clinical relevance.” J Clin | |
| | Pathol. 1983 May; 36(5): 539-45. | |

Anti-TfR1 antibody
CDRH1 (SEQ ID NO: 984)
CDRH2 (SEQ ID NO: 985)
CDRH3 (SEQ ID NO: 986)
CDRL1 (SEQ ID NO: 987)
CDRL2 (SEQ ID NO: 988)
CDRL3 (SEQ ID NO: 989)
VH (SEQ ID NO: 990)
VL (SEQ ID NO: 991)

Anti-TfR1 antibody

| | VH/VL | CDR1 | CDR2 | CDR3 |
|---|---|---|---|---|
| VH1 | 999 | 992 | 993 | 986 |
| VH2 | 1000 | 992 | 994 | 986 |
| VH3 | 1001 | 992 | 995 | 986 |
| VH4 | 1002 | 992 | 994 | 986 |
| VL1 | 1003 | 987 | 988 | 115 |
| VL2 | 1004 | 987 | 988 | 115 |
| VL3 | 1005 | 987 | 996 | 989 |
| VL4 | 1006 | 997 | 998 | 989 |

[0194] In some embodiments, anti-TfR1 antibodies of the present disclosure include one or more of the CDR-H (e.g., CDR-H1, CDR-H2, and CDR-H3) amino acid sequences from any one of the anti-TfR1 antibodies selected from Table 6. In some embodiments, anti-TfR1 antibodies include the CDR-L1, CDR-L2, and CDR-L3 as provided for any one of the anti-TfR1 antibodies selected from Table 6. In some embodiments, anti-TfR1 antibodies include the CDR-H1, CDR-H2, CDR-H3, CDR-L1, CDR-L2, and CDR-L3 as provided for any one of the anti-TfR1 antibodies selected from Table 6.

[0195] In some embodiments, anti-TfR1 antibodies of the disclosure include any antibody that includes a heavy chain variable domain and/or (e.g., and) a light chain variable domain of any anti-TfR1 antibody, such as any one of the anti-TfR1 antibodies selected from Table 6. In some embodiments, anti-TfR1 antibodies of the disclosure include any antibody that includes the heavy chain variable and light chain variable pairs of any anti-TfR1 antibody, such as any one of the anti-TfR1 antibodies selected from Table 6.

[0196] Aspects of the disclosure provide anti-TfR1 antibodies having a heavy chain variable (VH) and/or (e.g., and) a light chain variable (VL) domain amino acid sequence homologous to any of those described herein. In some embodiments, the anti-TfR1 antibody comprises a heavy chain variable sequence or a light chain variable sequence that is at least 75% (e.g., 80%, 85%, 90%, 95%, 98%, or 99%) identical to the heavy chain variable sequence and/or any light chain variable sequence of any anti-TfR1 antibody, such as any one of the anti-TfR1 antibodies selected from Table 6. In some embodiments, the homologous heavy chain variable and/or (e.g., and) a light chain variable amino acid sequences do not vary within any of the CDR sequences provided herein. For example, in some embodiments, the degree of sequence variation (e.g., 75%, 80%, 85%, 90%, 95%, 98%, or 99%) may occur within a heavy chain variable and/or (e.g., and) a light chain variable sequence excluding any of the CDR sequences provided herein. In some embodiments, any of the anti-TfR1 antibodies provided herein comprise a heavy chain variable sequence and a light chain variable sequence that comprises a framework sequence that is at least 75%, 80%, 85%, 90%, 95%, 98%, or 99% identical to the framework sequence of any anti-TfR1 antibody, such as any one of the anti-TfR1 antibodies selected from Table 6.

[0197] An example of a transferrin receptor antibody that may be used in accordance with the present disclosure is described in International Application Publication WO 2016/081643, incorporated herein by reference. The amino acid sequences of this antibody are provided in Table 7.

TABLE 7
Heavy chain and light chain CDRs of an example of a known anti-TfR1 antibody

| Sequence Type | Kabat | Chothia | Contact |
|---|---|---|---|
| CDR-H1 | SYWMH (SEQ ID | GYTFTSY (SEQ ID NO: 116) | TSYWMH (SEQ ID NO: 118) |
| | NO: 110) | | |
| CDR-H2 | EINPTNGRTNYIE | NPTNGR (SEQ ID NO: 117) | WIGEINPTNGRTN (SEQ ID |
| | KFKS (SEQ ID | | NO: 119) |
| | NO: 111) | | |
| CDR-H3 | GTRAYHY (SEQ | GTRAYHY (SEQ ID NO: | ARGTRA (SEQ ID NO: 120) |
| | ID NO: 112) | 112) | |
| CDR-L1 | RASDNLYSNLA | RASDNLYSNLA (SEQ ID | YSNLAWY |
| | (SEQ ID NO: 113) | NO: 113) | (SEQ ID NO: 121) |
| CDR-L2 | DATNLAD (SEQ | DATNLAD (SEQ ID NO: | LLVYDATNLA (SEQ ID NO: |
| | ID NO: 114) | 114) | 122) |
| CDR-L3 | QHFWGTPLT | QHFWGTPLT (SEQ ID NO: | QHFWGTPL (SEQ ID NO: |
| | (SEQ ID NO: 115) | 115) | 123) |

| | |
|---|---|
| Murine VH | QVQLQQPGAELVKPGASVKLSCKASGYTFTSYWMHWVKQRPGQGLEWIGEINP |
| | TNGRTNYIEKFKSKATLTVDKSSSTAYMQLSSLTSEDSAVYYCARGTRAYHYW |
| | GQGTSVTVSS (SEQ ID NO: 124) |
| Murine VL | DIQMTQSPASLSVSVGETVTITCRASDNLYSNLAWYQQKQGKSPQLLVYDATNL |
| | ADGVPSRFSGSGSGTQYSLKINSLQSEDFGTYYCQHFWGTPLTFGAGTKLELK |
| | (SEQ ID NO: 125) |
| Humanized VH | EVQLVQSGAEVKKPGASVKVSCKASGYTFTSYWMHWVRQAPGQRLEWIGEIN |
| | PTNGRTNYIEKFKSRATLTVDKSASTAYMELSSLRSEDTAVYYCARGTRAYHY |
| | WGQGTMVTVSS (SEQ ID NO: 128) |
| Humanized VL | DIQMTQSPSSLSASVGDRVTITCRASDNLYSNLAWYQQKPGKSPKLLVYDATNL |
| | ADGVPSRFSGSGSGTDYTLTISSLQPEDFATYYCQHFWGTPLTFGQGTKVEIK |
| | (SEQ ID NO: 129) |
| HC of chimeric | QVQLQQPGAELVKPGASVKLSCKASGYTFTSYWMHWVKQRPGQGLEWIGEINP |
| full-length IgG1 | TNGRTNYIEKFKSKATLTVDKSSSTAYMQLSSLTSEDSAVYYCARGTRAYHYW |
| | GQGTSVTVSSASTKGPSVFPLAPSSKSTSGGTAALGCLVKDYFPEPVTVSWNSG |
| | ALTSGVHTFPAVLQSSGLYSLSSVVTVPSSSLGTQTYICNVNHKPSNTKVDKKVE |
| | PKSCDKTHTCPPCPAPELLGGPSVFLFPPKPKDTLMISRTPEVTCVVVDVSHEDPE |
| | VKFNWYVDGVEVHNAKTKPREEQYNSTYRVVSVLTVLHQDWLNGKEYKCKV |
| | SNKALPAPIEKTISKAKGQPREPQVYTLPPSRDELTKNQVSLTCLVKGFYPSDIAV |
| | EWESNGQPENNYKTTPPVLDSDGSFFLYSKLTVDKSRWQQGNVFSCSVMHEAL |
| | HNHYTQKSLSLSPGK (SEQ ID NO: 132) |
| LC of chimeric | DIQMTQSPASLSVSVGETVTITCRASDNLYSNLAWYQQKQGKSPOLLVYDATNL |
| full-length IgG1 | ADGVPSRFSGSGSGTQYSLKINSLQSEDFGTYYCQHFWGTPLTFGAGTKLELKR |
| | TVAAPSVFIFPPSDEQLKSGTASVVCLLNNFYPREAKVQWKVDNALQSGNSQES |
| | VTEQDSKDSTYSLSSTLTLSKADYEKHKVYACEVTHQGLSSPVTKSFNRGEC |
| | (SEQ ID NO: 133) |
| HC of fully human | EVQLVQSGAEVKKPGASVKVSCKASGYTFTSYWMHWVRQAPGQRLEWIGEIN |
| full-length IgG1 | PTNGRTNYIEKFKSRATLTVDKSASTAYMELSSLRSEDTAVYYCARGTRAYHY |
| | WGQGTMVTVSSASTKGPSVFPLAPSSKSTSGGTAALGCLVKDYFPEPVTVSWNS |
| | GALTSGVHTFPAVLQSSGLYSLSSVVTVPSSSLGTQTYICNVNHKPSNTKVDKKV |
| | EPKSCDKTHTCPPCPAPELLGGPSVFLFPPKPKDTLMISRTPEVTCVVVDVSHEDP |
| | EVKFNWYVDGVEVHNAKTKPREEQYNSTYRVVSVLTVLHQDWLNGKEYKCK |
| | VSNKALPAPIEKTISKAKGQPREPQVYTLPPSRDELTKNQVSLTCLVKGFYPSDIA |
| | VEWESNGQPENNYKTTPPVLDSDGSFFLYSKLTVDKSRWQQGNVFSCSVMHEA |
| | LHNHYTQKSLSLSPGK (SEQ ID NO: 134) |
| LC of fully human | DIQMTQSPSSLSASVGDRVTITCRASDNLYSNLAWYQQKPGKSPKLLVYDATNL |
| full-length IgG1 | ADGVPSRFSGSGSGTDYTLTISSLQPEDFATYYCQHFWGTPLTFGQGTKVEIKRT |
| | VAAPSVFIFPPSDEQLKSGTASVVCLLNNFYPREAKVQWKVDNALQSGNSQESV |
| | TEQDSKDSTYSLSSTLTLSKADYEKHKVYACEVTHQGLSSPVTKSFNRGEC |
| | (SEQ ID NO: 135) |
| HC of chimeric | QVQLQQPGAELVKPGASVKLSCKASGYTFTSYWMHWVKQRPGQGLEWIGEINP |
| Fab | TNGRTNYIEKFKSKATLTVDKSSSTAYMQLSSLTSEDSAVYYCARGTRAYHYW |
| | GQGTSVTVSSASTKGPSVFPLAPSSKSTSGGTAALGCLVKDYFPEPVTVSWNSG |
| | ALTSGVHTFPAVLQSSGLYSLSSVVTVPSSSLGTQTYICNVNHKPSNTKVDKKVE |
| | PKSCDKTHTCP (SEQ ID NO: 136) |
| HC of fully human | EVQLVQSGAEVKKPGASVKVSCKASGYTFTSYWMHWVRQAPGQRLEWIGEIN |
| Fab | PTNGRTNYIEKFKSRATLTVDKSASTAYMELSSLRSEDTAVYYCARGTRAYHY |
| | WGQGTMVTVSSASTKGPSVFPLAPSSKSTSGGTAALGCLVKDYFPEPVTVSWNS |
| | GALTSGVHTFPAVLQSSGLYSLSSVVTVPSSSLGTQTYICNVNHKPSNTKVDKKV |
| | EPKSCDKTHTCP (SEQ ID NO: 137) |

[0198] In some embodiments, the anti-TfR1 antibody of the present disclosure comprises a CDR-H1, a CDR-H2, and a CDR-H3 that are the same as the CDR-H1, CDR-H2, and CDR-H3 shown in Table 7. Alternatively or in addition (e.g., in addition), the anti-TfR1 antibody of the present disclosure comprises a CDR-L1, a CDR-L2, and a CDR-L3 that are the same as the CDR-L1, CDR-L2, and CDR-L3 shown in Table 7.

[0199] In some embodiments, the anti-TfR1 antibody of the present disclosure comprises a CDR-L3, which contains no more than 3 amino acid variations (e.g., no more than 3, 2, or 1 amino acid variation) as compared with the CDR-L3 as shown in Table 7. In some embodiments, the anti-TfR1 antibody of the present disclosure comprises a CDR-L3 containing one amino acid variation as compared with the CDR-L3 as shown in Table 7. In some embodiments, the anti-TfR1 antibody of the present disclosure comprises a CDR-L3 of QHFAGTPLT (SEQ ID NO: 126) (according to the Kabat and Chothia definition system) or QHFAGTPL (SEQ ID NO: 127) (according to the Contact definition system). In some embodiments, the anti-TfR1 antibody of the present disclosure comprises a CDR-H1, a CDR-H2, a CDR-H3, a CDR-L1 and a CDR-L2 that are the same as the CDR-H1, CDR-H2, and CDR-H3 shown in Table 7, and comprises a CDR-L3 of QHFAGTPLT (SEQ ID NO: 126) (according to the Kabat and Chothia definition system) or QHFAGTPL (SEQ ID NO: 127) (according to the Contact definition system).

[0200] In some embodiments, the anti-TfR1 antibody of the present disclosure comprises heavy chain CDRs that collectively are at least 80% (e.g., 80%, 85%, 90%, 95%, or 98%) identical to the heavy chain CDRs as shown in Table 7. Alternatively or in addition (e.g., in addition), the anti-TfR1 antibody of the present disclosure comprises light chain CDRs that collectively are at least 80% (e.g., 80%, 85%, 90%, 95%, or 98%) identical to the light chain CDRs as shown in Table 7.

[0201] In some embodiments, the anti-TfR1 antibody of the present disclosure comprises a VH comprising the amino acid sequence of SEQ ID NO: 124. Alternatively or in addition (e.g., in addition), the anti-TfR1 antibody of the present disclosure comprises a VL comprising the amino acid sequence of SEQ ID NO: 125.

[0202] In some embodiments, the anti-TfR1 antibody of the present disclosure comprises a VH comprising the amino acid sequence of SEQ ID NO: 128. Alternatively or in addition (e.g., in addition), the anti-TfR1 antibody of the present disclosure comprises a VL comprising the amino acid sequence of SEQ ID NO: 129.

[0203] In some embodiments, the anti-TfR1 antibody of the present disclosure comprises a VH containing no more than 25 amino acid variations (e.g., no more than 25, 24, 23, 22, 21, 20, 19, 18, 17, 16, 15, 14, 13, 12, 11, 10, 9, 8, 7, 6, 5, 4, 3, 2, or 1 amino acid variation) as compared with the VH as set forth in SEQ ID NO: 128. Alternatively or in addition (e.g., in addition), the anti-TfR1 antibody of the present disclosure comprises a VL containing no more than 15 amino acid variations (e.g., no more than 20, 19, 18, 17, 16, 15, 14, 13, 12, 11, 9, 8, 7, 6, 5, 4, 3, 2, or 1 amino acid variation) as compared with the VL as set forth in SEQ ID NO: 129.

[0204] In some embodiments, the anti-TfR1 antibody of the present disclosure is a full-length IgG1 antibody, which can include a heavy constant region and a light constant region from a human antibody. In some embodiments, the heavy chain of any of the anti-TfR1 antibodies as described herein may comprises a heavy chain constant region (CH) or a portion thereof (e.g., CH1, CH2, CH3, or a combination thereof). The heavy chain constant region can of any suitable origin, e.g., human, mouse, rat, or rabbit. In one specific example, the heavy chain constant region is from a human IgG (a gamma heavy chain), e.g., IgG1, IgG2, or lgG4. An example of human IgG1 constant region is given below:

(SEQ ID NO: 81)
[sequence omitted]

[0205] In some embodiments, the light chain of any of the anti-TfR1 antibodies described herein may further comprise a light chain constant region (CL), which can be any CL known in the art. In some examples, the CL is a kappa light chain. In other examples, the CL is a lambda light chain. In some embodiments, the CL is a kappa light chain, the sequence of which is provided below:

(SEQ ID NO: 83)
RTVAAPSVFIFPPSDEQLKSGTASVVCLLNNFYPREAKVQWKVDNALQS
GNSQESVTEQDSKDSTYSLSSTLTLSKADYEKHKVYACEVTHQGLSSPV
TKSFNRGEC

[0206] In some embodiments, the anti-TfR1 antibody described herein is a chimeric antibody that comprises a heavy chain comprising the amino acid sequence of SEQ ID NO: 132. Alternatively or in addition (e.g., in addition), the anti-TfR1 antibody described herein comprises a light chain comprising the amino acid sequence of SEQ ID NO: 133.

[0207] In some embodiments, the anti-TfR1 antibody described herein is a fully human antibody that comprises a heavy chain comprising the amino acid sequence of SEQ ID NO: 134. Alternatively or in addition (e.g., in addition), the anti-TfR1 antibody described herein comprises a light chain comprising the amino acid sequence of SEQ ID NO: 135.

[0208] In some embodiments, the anti-TfR1 antibody is an antigen binding fragment (Fab) of an intact antibody (full-length antibody). In some embodiments, the anti-TfR1 Fab described herein comprises a heavy chain comprising the amino acid sequence of SEQ ID NO: 136. Alternatively or in addition (e.g., in addition), the anti-TfR1 Fab described herein comprises a light chain comprising the amino acid sequence of SEQ ID NO: 133. In some embodiments, the anti-TfR1 Fab described herein comprises a heavy chain comprising the amino acid sequence of SEQ ID NO: 137. Alternatively or in addition (e.g., in addition), the anti-TfR1 Fab described herein comprises a light chain comprising the amino acid sequence of SEQ ID NO: 135.

[0209] The anti-TfR1 antibodies described herein can be in any antibody form, including, but not limited to, intact (i.e., full-length) antibodies, antigen-binding fragments thereof (such as Fab, Fab′, F(ab′)2, Fv), single chain antibodies, bi-specific antibodies, or nanobodies. In some embodiments, the anti-TfR1 antibody described herein is an scFv. In some embodiments, the anti-TfR1 antibody described herein is an scFv-Fab (e.g., scFv fused to a portion of a constant region). In some embodiments, the anti-TfR1 antibody described herein is an scFv fused to a constant region (e.g., human IgG1 constant region as set forth in SEQ ID NO: 81).

[0210] In some embodiments, conservative mutations can be introduced into antibody sequences (e.g., CDRs or framework sequences) at positions where the residues are not likely to be involved in interacting with a target antigen (e.g., transferrin receptor), for example, as determined based on a crystal structure. In some embodiments, one, two or more mutations (e.g., amino acid substitutions) are introduced into the Fc region of an anti-TfR1 antibody described herein (e.g., in a CH2 domain (residues 231-340 of human IgG1) and/or (e.g., and) CH3 domain (residues 341-447 of human IgG1) and/or (e.g., and) the hinge region, with numbering according to the Kabat numbering system (e.g., the EU index in Kabat)) to alter one or more functional properties of the antibody, such as serum half-life, complement fixation, Fc receptor binding and/or (e.g., and) antigen-dependent cellular cytotoxicity.

[0211] In some embodiments, one, two or more mutations (e.g., amino acid substitutions) are introduced into the hinge region of the Fc region (CH1 domain) such that the number of cysteine residues in the hinge region are altered (e.g., increased or decreased) as described in, e.g., U.S. Pat. No. 5,677,425. The number of cysteine residues in the hinge region of the CH1 domain can be altered to, e.g., facilitate assembly of the light and heavy chains, or to alter (e.g., increase or decrease) the stability of the antibody or to facilitate linker conjugation.

[0212] In some embodiments, one, two or more mutations (e.g., amino acid substitutions) are introduced into the Fc region of a muscle-targeting antibody described herein (e.g., in a CH2 domain (residues 231-340 of human IgG1) and/or (e.g., and) CH3 domain (residues 341-447 of human IgG1) and/or (e.g., and) the hinge region, with numbering according to the Kabat numbering system (e.g., the EU index in Kabat)) to increase or decrease the affinity of the antibody for an Fc receptor (e.g., an activated Fc receptor) on the surface of an effector cell. Mutations in the Fc region of an antibody that decrease or increase the affinity of an antibody for an Fc receptor and techniques for introducing such mutations into the Fc receptor or fragment thereof are known to one of skill in the art. Examples of mutations in the Fc receptor of an antibody that can be made to alter the affinity of the antibody for an Fc receptor are described in, e.g., Smith P et al., (2012) PNAS 109: 6181-6186, U.S. Pat. No. 6,737,056, and International Publication Nos. WO 02/060919; WO 98/23289; and WO 97/34631, which are incorporated herein by reference.

[0213] In some embodiments, one, two or more amino acid mutations (i.e., substitutions, insertions or deletions) are introduced into an IgG constant domain, or FcRn-binding fragment thereof (preferably an Fc or hinge-Fc domain fragment) to alter (e.g., decrease or increase) half-life of the antibody in vivo. See, e.g., International Publication Nos. WO 02/060919; WO 98/23289; and WO 97/34631; and U.S. Pat. Nos. 5,869,046, 6,121,022, 6,277,375 and 6,165,745 for examples of mutations that will alter (e.g., decrease or increase) the half-life of an antibody in vivo.

[0214] In some embodiments, one, two or more amino acid mutations (i.e., substitutions, insertions or deletions) are introduced into an IgG constant domain, or FcRn-binding fragment thereof (preferably an Fc or hinge-Fc domain fragment) to decrease the half-life of the anti-TfR1 antibody in vivo. In some embodiments, one, two or more amino acid mutations (i.e., substitutions, insertions or deletions) are introduced into an IgG constant domain, or FcRn-binding fragment thereof (preferably an Fc or hinge-Fc domain fragment) to increase the half-life of the antibody in vivo. In some embodiments, the antibodies can have one or more amino acid mutations (e.g., substitutions) in the second constant (CH2) domain (residues 231-340 of human IgG1) and/or (e.g., and) the third constant (CH3) domain (residues 341-447 of human IgG1), with numbering according to the EU index in Kabat (Kabat E A et al., (1991) supra). In some embodiments, the constant region of the IgG1 of an antibody described herein comprises a methionine (M) to tyrosine (Y) substitution in position 252, a serine (S) to threonine (T) substitution in position 254, and a threonine (T) to glutamic acid (E) substitution in position 256, numbered according to the EU index as in Kabat. See U.S. Pat. No. 7,658,921, which is incorporated herein by reference. This type of mutant IgG, referred to as “YTE mutant” has been shown to display fourfold increased half-life as compared to wild-type versions of the same antibody (see Dall'Acqua W F et al., (2006) J Biol Chem 281: 23514-24). In some embodiments, an antibody comprises an IgG constant domain comprising one, two, three or more amino acid substitutions of amino acid residues at positions 251-257, 285-290, 308-314, 385-389, and 428-436, numbered according to the EU index as in Kabat.

[0215] In some embodiments, one, two or more amino acid substitutions are introduced into an IgG constant domain Fc region to alter the effector function(s) of the anti-TfR1 antibody. The effector ligand to which affinity is altered can be, for example, an Fc receptor or the C1 component of complement. This approach is described in further detail in U.S. Pat. Nos. 5,624,821 and 5,648,260. In some embodiments, the deletion or inactivation (through point mutations or other means) of a constant region domain can reduce Fc receptor binding of the circulating antibody thereby increasing tumor localization. See, e.g., U.S. Pat. Nos. 5,585,097 and 8,591,886 for a description of mutations that delete or inactivate the constant domain and thereby increase tumor localization. In some embodiments, one or more amino acid substitutions may be introduced into the Fc region of an antibody described herein to remove potential glycosylation sites on Fc region, which may reduce Fc receptor binding (sec, e.g., Shields R L et al., (2001) J Biol Chem 276: 6591-604).

[0216] In some embodiments, one or more amino in the constant region of an anti-TfR1 antibody described herein can be replaced with a different amino acid residue such that the antibody has altered C1q binding and/or (e.g., and) reduced or abolished complement dependent cytotoxicity (CDC). This approach is described in further detail in U.S. Pat. No. 6,194,551 (Idusogie et al). In some embodiments, one or more amino acid residues in the N-terminal region of the CH2 domain of an antibody described herein are altered to thereby alter the ability of the antibody to fix complement. This approach is described further in International Publication No. WO 94/29351. In some embodiments, the Fc region of an antibody described herein is modified to increase the ability of the antibody to mediate antibody dependent cellular cytotoxicity (ADCC) and/or (e.g., and) to increase the affinity of the antibody for an Fcγ receptor. This approach is described further in International Publication No. WO 00/42072.

[0217] In some embodiments, the heavy and/or (e.g., and) light chain variable domain(s) sequence(s) of the antibodies provided herein can be used to generate, for example, CDR-grafted, chimeric, humanized, or composite human antibodies or antigen-binding fragments, as described elsewhere herein. As understood by one of ordinary skill in the art, any variant, CDR-grafted, chimeric, humanized, or composite antibodies derived from any of the antibodies provided herein may be useful in the compositions and methods described herein and will maintain the ability to specifically bind transferrin receptor, such that the variant, CDR-grafted, chimeric, humanized, or composite antibody has at least 50%, at least 60%, at least 70%, at least 80%, at least 90%, at least 95% or more binding to transferrin receptor relative to the original antibody from which it is derived.

[0218] In some embodiments, the antibodies provided herein comprise mutations that confer desirable properties to the antibodies. For example, to avoid potential complications due to Fab-arm exchange, which is known to occur with native IgG4 mAbs, the antibodies provided herein may comprise a stabilizing ‘Adair’ mutation (Angal S., et al., “A single amino acid substitution abolishes the heterogeneity of chimeric mouse/human (lgG4) antibody,” Mol Immunol 30, 105-108; 1993), where serine 228 (EU numbering; residue 241 Kabat numbering) is converted to proline resulting in an IgG1-like hinge sequence. Accordingly, any of the antibodies may include a stabilizing ‘Adair’ mutation.

[0219] In some embodiments, an antibody is modified, e.g., modified via glycosylation, phosphorylation, sumoylation, and/or (e.g., and) methylation. In some embodiments, an antibody is a glycosylated antibody, which is conjugated to one or more sugar or carbohydrate molecules. In some embodiments, the one or more sugar or carbohydrate molecule are conjugated to the antibody via N-glycosylation, O-glycosylation, C-glycosylation, glypiation (GPI anchor attachment), and/or (e.g., and) phosphoglycosylation. In some embodiments, the one or more sugar or carbohydrate molecules are monosaccharides, disaccharides, oligosaccharides, or glycans. In some embodiments, the one or more sugar or carbohydrate molecule is a branched oligosaccharide or a branched glycan. In some embodiments, the one or more sugar or carbohydrate molecule includes a mannose unit, a glucose unit, an N-acetylglucosamine unit, an N-acetylgalactosamine unit, a galactose unit, a fucose unit, or a phospholipid unit. In some embodiments, there are about 1-10, about 1-5, about 5-10, about 1-4, about 1-3, or about 2 sugar molecules. In some embodiments, a glycosylated antibody is fully or partially glycosylated. In some embodiments, an antibody is glycosylated by chemical reactions or by enzymatic means. In some embodiments, an antibody is glycosylated in vitro or inside a cell, which may optionally be deficient in an enzyme in the N- or O-glycosylation pathway, e.g. a glycosyltransferase. In some embodiments, an antibody is functionalized with sugar or carbohydrate molecules as described in International Patent Application Publication WO2014065661, published on May 1, 2014, entitled, “Modified antibody, antibody-conjugate and process for the preparation thereof”.

[0220] In some embodiments, any one of the anti-TfR1 antibodies described herein may comprise a signal peptide in the heavy and/or (e.g., and) light chain sequence (e.g., a N-terminal signal peptide). In some embodiments, the anti-TfR1 antibody described herein comprises any one of the VH and VL sequences, any one of the IgG heavy chain and light chain sequences, or any one of the F(ab′) heavy chain and light chain sequences described herein, and further comprises a signal peptide (e.g., a N-terminal signal peptide). In some embodiments, the signal peptide comprises the amino acid sequence of MGWSCIILFLVATATGVHS (SEQ ID NO: 104).

[0221] In some embodiments, an antibody provided herein may have one or more post-translational modifications. In some embodiments, N-terminal cyclization, also called pyroglutamate formation (pyro-Glu), may occur in the antibody at N-terminal Glutamate (Glu) and/or Glutamine (Gln) residues during production. As such, it should be appreciated that an antibody specified as having a sequence comprising an N-terminal glutamate or glutamine residue encompasses antibodies that have undergone pyroglutamate formation resulting from a post-translational modification. In some embodiments, pyroglutamate formation occurs in a heavy chain sequence. In some embodiments, pyroglutamate formation occurs in a light chain sequence.

### b. Other Muscle-Targeting Antibodies

[0222] In some embodiments, the muscle-targeting antibody is an antibody that specifically binds hemojuvelin, caveolin-3, Duchenne muscular dystrophy peptide, myosin IIb or CD63. In some embodiments, the muscle-targeting antibody is an antibody that specifically binds a myogenic precursor protein. Exemplary myogenic precursor proteins include, without limitation, ABCG2, M-Cadherin/Cadherin-15, Caveolin-1, CD34, FoxK1, Integrin alpha 7, Integrin alpha 7 beta 1. MYF-5, MyoD, Myogenin, NCAM-1/CD56, Pax3, Pax7, and Pax9. In some embodiments, the muscle-targeting antibody is an antibody that specifically binds a skeletal muscle protein. Exemplary skeletal muscle proteins include, without limitation, alpha-Sarcoglycan, beta-Sarcoglycan, Calpain Inhibitors, Creatine Kinase MM/CKMM, cIF5A, Enolase 2/Neuron-specific Enolase, epsilon-Sarcoglycan, FABP3/H-FABP. GDF-8/Myostatin, GDF-11/GDF-8, Integrin alpha 7, Integrin alpha 7 beta 1, Integrin beta 1/CD29, MCAM/CD146, MyoD. Myogenin, Myosin Light Chain Kinase Inhibitors, NCAM-1/CD56, and Troponin I. In some embodiments, the muscle-targeting antibody is an antibody that specifically binds a smooth muscle protein. Exemplary smooth muscle proteins include, without limitation, alpha-Smooth Muscle Actin, VE-Cadherin, Caldesmon/CALD1, Calponin 1, Desmin, Histamine H2 R. Motilin R/GPR38, Transgelin/TAGLN, and Vimentin. However, it should be appreciated that antibodies to additional targets are within the scope of this disclosure and the exemplary lists of targets provided herein are not meant to be limiting.

### c. Antibody Features/Alterations

[0223] In some embodiments, conservative mutations can be introduced into antibody sequences (e.g., CDRs or framework sequences) at positions where the residues are not likely to be involved in interacting with a target antigen (e.g., transferrin receptor), for example, as determined based on a crystal structure. In some embodiments, one, two or more mutations (e.g., amino acid substitutions) are introduced into the Fc region of a muscle-targeting antibody described herein (e.g., in a CH2 domain (residues 231-340 of human IgG1) and/or (e.g., and) CH3 domain (residues 341-447 of human IgG1) and/or (e.g., and) the hinge region, with numbering according to the Kabat numbering system (e.g., the EU index in Kabat)) to alter one or more functional properties of the antibody, such as serum half-life, complement fixation, Fc receptor binding and/or (e.g., and) antigen-dependent cellular cytotoxicity.

[0224] In some embodiments, one, two or more mutations (e.g., amino acid substitutions) are introduced into the hinge region of the Fc region (CH1 domain) such that the number of cysteine residues in the hinge region are altered (e.g., increased or decreased) as described in, e.g., U.S. Pat. No. 5,677,425. The number of cysteine residues in the hinge region of the CH1 domain can be altered to, e.g., facilitate assembly of the light and heavy chains, or to alter (e.g., increase or decrease) the stability of the antibody or to facilitate linker conjugation.

[0225] In some embodiments, one, two or more mutations (e.g., amino acid substitutions) are introduced into the Fc region of a muscle-targeting antibody described herein (e.g., in a CH2 domain (residues 231-340 of human IgG1) and/or (e.g., and) CH3 domain (residues 341-447 of human IgG1) and/or (e.g., and) the hinge region, with numbering according to the Kabat numbering system (e.g., the EU index in Kabat)) to increase or decrease the affinity of the antibody for an Fc receptor (e.g., an activated Fc receptor) on the surface of an effector cell. Mutations in the Fc region of an antibody that decrease or increase the affinity of an antibody for an Fc receptor and techniques for introducing such mutations into the Fc receptor or fragment thereof are known to one of skill in the art. Examples of mutations in the Fc receptor of an antibody that can be made to alter the affinity of the antibody for an Fc receptor are described in, e.g., Smith P et al., (2012) PNAS 109: 6181-6186, U.S. Pat. No. 6,737,056, and International Publication Nos. WO 02/060919; WO 98/23289; and WO 97/34631, which are incorporated herein by reference.

[0226] In some embodiments, one, two or more amino acid mutations (i.e., substitutions, insertions or deletions) are introduced into an IgG constant domain, or FcRn-binding fragment thereof (preferably an Fc or hinge-Fc domain fragment) to alter (e.g., decrease or increase) half-life of the antibody in vivo. See, e.g., International Publication Nos. WO 02/060919; WO 98/23289; and WO 97/34631; and U.S. Pat. Nos. 5,869,046, 6,121,022, 6,277,375 and 6,165,745 for examples of mutations that will alter (e.g., decrease or increase) the half-life of an antibody in vivo.

[0227] In some embodiments, one, two or more amino acid mutations (i.e., substitutions, insertions or deletions) are introduced into an IgG constant domain, or FcRn-binding fragment thereof (preferably an Fc or hinge-Fc domain fragment) to decrease the half-life of the anti-transferrin receptor antibody in vivo. In some embodiments, one, two or more amino acid mutations (i.e., substitutions, insertions or deletions) are introduced into an IgG constant domain, or FcRn-binding fragment thereof (preferably an Fc or hinge-Fc domain fragment) to increase the half-life of the antibody in vivo. In some embodiments, the antibodies can have one or more amino acid mutations (e.g., substitutions) in the second constant (CH2) domain (residues 231-340 of human IgG1) and/or (e.g., and) the third constant (CH3) domain (residues 341-447 of human IgG1), with numbering according to the EU index in Kabat (Kabat E A et al., (1991) supra). In some embodiments, the constant region of the IgG1 of an antibody described herein comprises a methionine (M) to tyrosine (Y) substitution in position 252, a serine (S) to threonine (T) substitution in position 254, and a threonine (T) to glutamic acid (E) substitution in position 256, numbered according to the EU index as in Kabat. See U.S. Pat. No. 7,658,921, which is incorporated herein by reference. This type of mutant IgG, referred to as “YTE mutant” has been shown to display fourfold increased half-life as compared to wild-type versions of the same antibody (see Dall'Acqua W F et al., (2006) J Biol Chem 281: 23514-24). In some embodiments, an antibody comprises an IgG constant domain comprising one, two, three or more amino acid substitutions of amino acid residues at positions 251-257, 285-290, 308-314, 385-389, and 428-436, numbered according to the EU index as in Kabat.

[0228] In some embodiments, one, two or more amino acid substitutions are introduced into an IgG constant domain Fc region to alter the effector function(s) of the anti-transferrin receptor antibody. The effector ligand to which affinity is altered can be, for example, an Fc receptor or the C1 component of complement. This approach is described in further detail in U.S. Pat. Nos. 5,624,821 and 5,648,260. In some embodiments, the deletion or inactivation (through point mutations or other means) of a constant region domain can reduce Fc receptor binding of the circulating antibody thereby increasing tumor localization. Sec. e.g., U.S. Pat. Nos. 5,585,097 and 8,591,886 for a description of mutations that delete or inactivate the constant domain and thereby increase tumor localization. In some embodiments, one or more amino acid substitutions may be introduced into the Fc region of an antibody described herein to remove potential glycosylation sites on Fc region, which may reduce Fc receptor binding (see, e.g., Shields R L et al., (2001) J Biol Chem 276: 6591-604).

[0229] In some embodiments, one or more amino in the constant region of a muscle-targeting antibody described herein can be replaced with a different amino acid residue such that the antibody has altered C1q binding and/or (e.g., and) reduced or abolished complement dependent cytotoxicity (CDC). This approach is described in further detail in U.S. Pat. No. 6,194,551 (Idusogie et al). In some embodiments, one or more amino acid residues in the N-terminal region of the CH2 domain of an antibody described herein are altered to thereby alter the ability of the antibody to fix complement. This approach is described further in International Publication No. WO 94/29351. In some embodiments, the Fc region of an antibody described herein is modified to increase the ability of the antibody to mediate antibody dependent cellular cytotoxicity (ADCC) and/or (e.g., and) to increase the affinity of the antibody for an Fcγ receptor. This approach is described further in International Publication No. WO 00/42072.

[0230] In some embodiments, the heavy and/or (e.g., and) light chain variable domain(s) sequence(s) of the antibodies provided herein can be used to generate, for example, CDR-grafted, chimeric, humanized, or composite human antibodies or antigen-binding fragments, as described elsewhere herein. As understood by one of ordinary skill in the art, any variant, CDR-grafted, chimeric, humanized, or composite antibodies derived from any of the antibodies provided herein may be useful in the compositions and methods described herein and will maintain the ability to specifically bind transferrin receptor, such that the variant, CDR-grafted, chimeric, humanized, or composite antibody has at least 50%, at least 60%, at least 70%, at least 80%, at least 90%, at least 95% or more binding to transferrin receptor relative to the original antibody from which it is derived.

[0231] In some embodiments, the antibodies provided herein comprise mutations that confer desirable properties to the antibodies. For example, to avoid potential complications due to Fab-arm exchange, which is known to occur with native IgG4 mAbs, the antibodies provided herein may comprise a stabilizing ‘Adair’ mutation (Angal S., et al., “A single amino acid substitution abolishes the heterogeneity of chimeric mouse/human (lgG4) antibody,” Mol Immunol 30, 105-108; 1993), where serine 228 (EU numbering; residue 241 Kabat numbering) is converted to proline resulting in an IgG1-like hinge sequence. Accordingly, any of the antibodies may include a stabilizing ‘Adair’ mutation.

[0232] As provided herein, antibodies of this disclosure may optionally comprise constant regions or parts thereof. For example, a VL domain may be attached at its C-terminal end to a light chain constant domain like Cκ or Cλ. Similarly, a VH domain or portion thereof may be attached to all or part of a heavy chain like IgA, IgD, IgE, IgG, and IgM, and any isotype subclass. Antibodies may include suitable constant regions (see, for example, Kabat et al., Sequences of Proteins of Immunological Interest, No. 91-3242, National Institutes of Health Publications, Bethesda, Md. (1991)). Therefore, antibodies within the scope of this may disclosure include VH and VL domains, or an antigen binding portion thereof, combined with any suitable constant regions.

ii. Muscle-Targeting Peptides

[0233] Some aspects of the disclosure provide muscle-targeting peptides as muscle-targeting agents. Short peptide sequences (e.g., peptide sequences of 5-20 amino acids in length) that bind to specific cell types have been described. For example, cell-targeting peptides have been described in Vines c., et al., A. “Cell-penetrating and cell-targeting peptides in drug delivery” Biochim Biophys Acta 2008, 1786: 126-38; Jarver P., et al., “In vivo biodistribution and efficacy of peptide mediated delivery” Trends Pharmacol Sci 2010; 31: 528-35; Samoylova T. I., et al., “Elucidation of muscle-binding peptides by phage display screening” Muscle Nerve 1999; 22: 460-6; U.S. Pat. No. 6,329,501, issued on Dec. 11, 2001, entitled “METHODS AND COMPOSITIONS FOR TARGETING COMPOUNDS TO MUSCLE”; and Samoylov A. M., et al., “Recognition of cell-specific binding of phage display derived peptides using an acoustic wave sensor.” Biomol Eng 2002; 18: 269-72; the entire contents of each of which are incorporated herein by reference. By designing peptides to interact with specific cell surface antigens (e.g., receptors), selectivity for a desired tissue, e.g., muscle, can be achieved. Skeletal muscle-targeting has been investigated and a range of molecular payloads are able to be delivered. These approaches may have high selectivity for muscle tissue without many of the practical disadvantages of a large antibody or viral particle. Accordingly, in some embodiments, the muscle-targeting agent is a muscle-targeting peptide that is from 4 to 50 amino acids in length. In some embodiments, the muscle-targeting peptide is 4, 5, 6, 7, 8, 9, 10, 11, 12, 13, 14, 15, 16, 17, 18, 19, 20, 21, 22, 23, 24, 25, 26, 27, 28, 29, 30, 31, 32, 33, 34, 35, 36, 37, 38, 39, 40, 41, 42, 43, 44, 45, 46, 47, 48, 49, or 50 amino acids in length. Muscle-targeting peptides can be generated using any of several methods, such as phage display.

[0234] In some embodiments, a muscle-targeting peptide may bind to an internalizing cell surface receptor that is overexpressed or relatively highly expressed in muscle cells, e.g. a transferrin receptor, compared with certain other cells. In some embodiments, a muscle-targeting peptide may target, e.g., bind to, a transferrin receptor. In some embodiments, a peptide that targets a transferrin receptor may comprise a segment of a naturally occurring ligand, e.g., transferrin. In some embodiments, a peptide that targets a transferrin receptor is as described in U.S. Pat. No. 6,743,893, filed Nov. 30, 2000, “RECEPTOR-MEDIATED UPTAKE OF PEPTIDES THAT BIND THE HUMAN TRANSFERRIN RECEPTOR”. In some embodiments, a peptide that targets a transferrin receptor is as described in Kawamoto, M. et al, “A novel transferrin receptor-targeted hybrid peptide disintegrates cancer cell membrane to induce rapid killing of cancer cells.” BMC Cancer. 2011 Aug. 18; 11:359. In some embodiments, a peptide that targets a transferrin receptor is as described in U.S. Pat. No. 8,399,653, filed May 20, 2011. “TRANSFERRIN/TRANSFERRIN RECEPTOR-MEDIATED SIRNA DELIVERY”.

[0235] As discussed above, examples of muscle targeting peptides have been reported. For example, muscle-specific peptides were identified using phage display library presenting surface heptapeptides. As one example a peptide having the amino acid sequence ASSLNIA (SEQ ID NO: 975) bound to C2C12 murine myotubes in vitro, and bound to mouse muscle tissue in vivo. Accordingly, in some embodiments, the muscle-targeting agent comprises the amino acid sequence ASSLNIA (SEQ ID NO: 975). This peptide displayed improved specificity for binding to heart and skeletal muscle tissue after intravenous injection in mice with reduced binding to liver, kidney, and brain. Additional muscle-specific peptides have been identified using phage display. For example, a 12 amino acid peptide was identified by phage display library for muscle targeting in the context of treatment for Duchenne muscular dystrophy. Sec, Yoshida D., et al., “Targeting of salicylate to skin and muscle following topical injections in rats.” Int J Pharm 2002; 231: 177-84; the entire contents of which are hereby incorporated by reference. Here, a 12 amino acid peptide having the sequence SKTFNTHPQSTP (SEQ ID NO: 976) was identified and this muscle-targeting peptide showed improved binding to C2C12 cells relative to the ASSLNIA (SEQ ID NO: 975) peptide.

[0236] An additional method for identifying peptides selective for muscle (e.g., skeletal muscle) over other cell types includes in vitro selection, which has been described in Ghosh D., et al., “Selection of muscle-binding peptides from context-specific peptide-presenting phage libraries for adenoviral vector targeting” J Virol 2005; 79: 13667-72; the entire contents of which are incorporated herein by reference. By pre-incubating a random 12-mer peptide phage display library with a mixture of non-muscle cell types, non-specific cell binders were selected out. Following rounds of selection the 12 amino acid peptide TARGEHKEEELI (SEQ ID NO: 977) appeared most frequently. Accordingly, in some embodiments, the muscle-targeting agent comprises the amino acid sequence TARGEHKEEELI (SEQ ID NO: 977).

[0237] A muscle-targeting agent may an amino acid-containing molecule or peptide. A muscle-targeting peptide may correspond to a sequence of a protein that preferentially binds to a protein receptor found in muscle cells. In some embodiments, a muscle-targeting peptide contains a high propensity of hydrophobic amino acids, e.g. valine, such that the peptide preferentially targets muscle cells. In some embodiments, a muscle-targeting peptide has not been previously characterized or disclosed. These peptides may be conceived of, produced, synthesized, and/or (e.g., and) derivatized using any of several methodologies, e.g. phage displayed peptide libraries, one-bead one-compound peptide libraries, or positional scanning synthetic peptide combinatorial libraries. Exemplary methodologies have been characterized in the art and are incorporated by reference (Gray, B. P. and Brown, K. C. “Combinatorial Peptide Libraries: Mining for Cell-Binding Peptides” Chem Rev. 2014, 114:2, 1020-1081; Samoylova, T. I. and Smith, B. F. “Elucidation of muscle-binding peptides by phage display screening.” Muscle Nerve, 1999, 22:4. 460-6). In some embodiments, a muscle-targeting peptide has been previously disclosed (see, e.g. Writer M. J. et al. “Targeted gene delivery to human airway epithelial cells with synthetic vectors incorporating novel targeting peptides selected by phage display.” J. Drug Targeting. 2004; 12:185; Cai, D. “BDNF-mediated enhancement of inflammation and injury in the aging heart.” Physiol Genomics. 2006, 24:3, 191-7; Zhang. L. “Molecular profiling of heart endothelial cells.” Circulation, 2005, 112:11, 1601-11; McGuire, M. J. et al. “In vitro selection of a peptide with high selectivity for cardiomyocytes in vivo.” J Mol Biol. 2004, 342:1, 171-82). Exemplary muscle-targeting peptides comprise an amino acid sequence of the following group: CQAQGQLVC (SEQ ID NO: 978), CSERSMNFC (SEQ ID NO: 979), CPKTRRVPC (SEQ ID NO: 980), WLSEAGPVVTVRALRGTGSW (SEQ ID NO: 981), ASSLNIA (SEQ ID NO: 975), CMQHSMRVC (SEQ ID NO: 982), and DDTRHWG (SEQ ID NO: 983). In some embodiments, a muscle-targeting peptide may comprise about 2-25 amino acids, about 2-20 amino acids, about 2-15 amino acids, about 2-10 amino acids, or about 2-5 amino acids. Muscle-targeting peptides may comprise naturally-occurring amino acids, e.g. cysteine, alanine, or non-naturally-occurring or modified amino acids. Non-naturally occurring amino acids include β-amino acids, homo-amino acids, proline derivatives, 3-substituted alanine derivatives, linear core amino acids, N-methyl amino acids, and others known in the art. In some embodiments, a muscle-targeting peptide may be linear; in other embodiments, a muscle-targeting peptide may be cyclic, e.g. bicyclic (see, e.g. Silvana, M. G. et al. Mol. Therapy, 2018, 26:1, 132-147).

iii. Muscle-Targeting Receptor Ligands

[0238] A muscle-targeting agent may be a ligand, e.g. a ligand that binds to a receptor protein. A muscle-targeting ligand may be a protein, e.g. transferrin, which binds to an internalizing cell surface receptor expressed by a muscle cell. Accordingly, in some embodiments, the muscle-targeting agent is transferrin, or a derivative thereof that binds to a transferrin receptor. A muscle-targeting ligand may alternatively be a small molecule, e.g. a lipophilic small molecule that preferentially targets muscle cells relative to other cell types. Exemplary lipophilic small molecules that may target muscle cells include compounds comprising cholesterol, cholesteryl, stearic acid, palmitic acid, oleic acid, oleyl, linolene, linoleic acid, myristic acid, sterols, dihydrotestosterone, testosterone derivatives, glycerine, alkyl chains, trityl groups, and alkoxy acids.

iv. Muscle-Targeting Aptamers

[0239] A muscle-targeting agent may be an aptamer, e.g. an RNA aptamer, which preferentially targets muscle cells relative to other cell types. In some embodiments, a muscle-targeting aptamer has not been previously characterized or disclosed. These aptamers may be conceived of, produced, synthesized, and/or (e.g., and) derivatized using any of several methodologies, e.g. Systematic Evolution of Ligands by Exponential Enrichment. Exemplary methodologies have been characterized in the art and are incorporated by reference (Yan, A. C. and Levy, M. “Aptamers and aptamer targeted delivery” RNA biology, 2009, 6:3, 316-20; Germer, K. et al. “RNA aptamers and their therapeutic and diagnostic applications.” Int. J. Biochem. Mol. Biol. 2013; 4: 27-40). In some embodiments, a muscle-targeting aptamer has been previously disclosed (see, e.g. Phillippou, S. et al. “Selection and Identification of Skeletal-Muscle-Targeted RNA Aptamers.” Mol Ther Nucleic Acids. 2018, 10:199-214; Thiel, W. H. et al. “Smooth Muscle Cell-targeted RNA Aptamer Inhibits Neointimal Formation.” Mol Ther. 2016, 24:4, 779-87). Exemplary muscle-targeting aptamers include the A01B RNA aptamer and RNA Apt 14. In some embodiments, an aptamer is a nucleic acid-based aptamer, an oligonucleotide aptamer or a peptide aptamer. In some embodiments, an aptamer may be about 5-15 kDa, about 5-10 kDa, about 10-15 kDa, about 1-5 Da, about 1-3 kDa, or smaller.

v. Other Muscle-Targeting Agents

[0240] One strategy for targeting a muscle cell (e.g., a skeletal muscle cell) is to use a substrate of a muscle transporter protein, such as a transporter protein expressed on the sarcolemma. In some embodiments, the muscle-targeting agent is a substrate of an influx transporter that is specific to muscle tissue. In some embodiments, the influx transporter is specific to skeletal muscle tissue. Two main classes of transporters are expressed on the skeletal muscle sarcolemma, (1) the adenosine triphosphate (ATP) binding cassette (ABC) superfamily, which facilitate efflux from skeletal muscle tissue and (2) the solute carrier (SLC) superfamily, which can facilitate the influx of substrates into skeletal muscle. In some embodiments, the muscle-targeting agent is a substrate that binds to an ABC superfamily or an SLC superfamily of transporters. In some embodiments, the substrate that binds to the ABC or SLC superfamily of transporters is a naturally-occurring substrate. In some embodiments, the substrate that binds to the ABC or SLC superfamily of transporters is a non-naturally occurring substrate, for example, a synthetic derivative thereof that binds to the ABC or SLC superfamily of transporters.

[0241] In some embodiments, the muscle-targeting agent is any muscle targeting agent described herein (e.g., antibodies, nucleic acids, small molecules, peptides, aptamers, lipids, sugar moieties) that target SLC superfamily of transporters. In some embodiments, the muscle-targeting agent is a substrate of an SLC superfamily of transporters. SLC transporters are either equilibrative or use proton or sodium ion gradients created across the membrane to drive transport of substrates. Exemplary SLC transporters that have high skeletal muscle expression include, without limitation, the SATT transporter (ASCT1; SLC1A4), GLUT4 transporter (SLC2A4), GLUT7 transporter (GLUT7; SLC2A7), ATRC2 transporter (CAT-2; SLC7A2), LAT3 transporter (KIAA0245; SLC7A6), PHT1 transporter (PTR4; SLC15A4), OATP-J transporter (OATP5A1; SLC21A15), OCT3 transporter (EMT; SLC22A3), OCTN2 transporter (FLJ46769; SLC22A5), ENT transporters (ENT1; SLC29A1 and ENT2; SLC29A2), PAT2 transporter (SLC36A2), and SAT2 transporter (KIAA1382; SLC38A2). These transporters can facilitate the influx of substrates into skeletal muscle, providing opportunities for muscle targeting.

[0242] In some embodiments, the muscle-targeting agent is a substrate of an equilibrative nucleoside transporter 2 (ENT2) transporter. Relative to other transporters, ENT2 has one of the highest mRNA expressions in skeletal muscle. While human ENT2 (hENT2) is expressed in most body organs such as brain, heart, placenta, thymus, pancreas, prostate, and kidney, it is especially abundant in skeletal muscle. Human ENT2 facilitates the uptake of its substrates depending on their concentration gradient. ENT2 plays a role in maintaining nucleoside homeostasis by transporting a wide range of purine and pyrimidine nucleobases. The hENT2 transporter has a low affinity for all nucleosides (adenosine, guanosine, uridine, thymidine, and cytidine) except for inosine. Accordingly, in some embodiments, the muscle-targeting agent is an ENT2 substrate. Exemplary ENT2 substrates include, without limitation, inosine, 2′,3′-dideoxyinosine, and calofarabine. In some embodiments, any of the muscle-targeting agents provided herein are associated with a molecular payload (e.g., oligonucleotide payload). In some embodiments, the muscle-targeting agent is covalently linked to the molecular payload. In some embodiments, the muscle-targeting agent is non-covalently linked to the molecular payload.

[0243] In some embodiments, the muscle-targeting agent is a substrate of an organic cation/carnitine transporter (OCTN2), which is a sodium ion-dependent, high affinity carnitine transporter. In some embodiments, the muscle-targeting agent is carnitine, mildronate, acetylcarnitine, or any derivative thereof that binds to OCTN2. In some embodiments, the carnitine, mildronate, acetylcarnitine, or derivative thereof is covalently linked to the molecular payload (e.g., oligonucleotide payload).

[0244] A muscle-targeting agent may be a protein that is protein that exists in at least one soluble form that targets muscle cells. In some embodiments, a muscle-targeting protein may be hemojuvelin (also known as repulsive guidance molecule C or hemochromatosis type 2 protein), a protein involved in iron overload and homeostasis. In some embodiments, hemojuvelin may be full length or a fragment, or a mutant with at least 75%, at least 80%, at least 85%, at least 90%, at least 95%, at least 98% or at least 99% sequence identity to a functional hemojuvelin protein. In some embodiments, a hemojuvelin mutant may be a soluble fragment, may lack a N-terminal signaling, and/or (e.g., and) lack a C-terminal anchoring domain. In some embodiments, hemojuvelin may be annotated under GenBank RefSeq Accession Numbers NM_001316767.1. NM_145277.4, NM_202004.3, NM_213652.3, or NM_213653.3. It should be appreciated that a hemojuvelin may be of human, non-human primate, or rodent origin.

### B. Molecular Payloads

[0245] Some aspects of the disclosure provide molecular payloads, e.g., for modulating a biological outcome, e.g., the transcription of a DNA sequence, the splicing and processing of a RNA sequence, the expression of a protein, or the activity of a protein. In some embodiments, a molecular payload is linked to, or otherwise associated with a muscle-targeting agent. In some embodiments, such molecular payloads are capable of targeting to a muscle cell, e.g., via specifically binding to a nucleic acid or protein in the muscle cell following delivery to the muscle cell by an associated muscle-targeting agent. It should be appreciated that various types of molecular payloads may be used in accordance with the disclosure. For example, the molecular payload may comprise, or consist of, an oligonucleotide (e.g., antisense oligonucleotide), a peptide (e.g., a peptide that binds a nucleic acid or protein associated with disease in a muscle cell), a protein (e.g., a protein that binds a nucleic acid or protein associated with disease in a muscle cell), or a small molecule (e.g., a small molecule that modulates the function of a nucleic acid or protein associated with disease in a muscle cell). In some embodiments, the molecular payload is an oligonucleotide that comprises a strand having a region of complementarity to a mutated DMD allele. Exemplary molecular payloads are described in further detail herein, however, it should be appreciated that the exemplary molecular payloads provided herein are not meant to be limiting.

i. Oligonucleotides

[0246] Aspects of the disclosure relate to oligonucleotides configured to modulate (e.g., increase) expression of dystrophin, e.g., from a DMD allele. In some embodiments, oligonucleotides provided herein are configured to alter splicing of DMD pre-mRNA to promote expression of dystrophin protein (e.g., a functional truncated dystrophin protein). In some embodiments, oligonucleotides provided herein are configured to promote skipping of one or more exons in DMD, e.g., in a mutated DMD allele, in order to restore the reading frame. In some embodiments, the oligonucleotides allow for functional dystrophin protein expression (e.g., as described in Lee T, Awano H. Yagi M, et al. 2′-O-Methyl RNA/Ethylene-Bridged Nucleic Acid Chimera Antisense Oligonucleotides to Induce Dystrophin Exon 45 Skipping. Genes. 2017; 8(2):67 and Watanabe N, Nagata T, Satou Y, et al. NS-065/NCNP-01: an antisense oligonucleotide for potential treatment of exon 53 skipping in Duchenne muscular dystrophy. Mol Ther Nucleic Acids. 2018; 13:442-449). In some embodiments, oligonucleotides provided are configured to promote skipping of exon 45 to produce a shorter but functional version of dystrophin (e.g., containing an in-frame deletion). In some embodiments, oligonucleotides are provided that promote exon 45 skipping (e.g., which may be relevant in a substantial number of patients, including, for example, patients amenable to exon 44 skipping, such as those having deletions in DMD exons 7-44, 12-44, 18-44, 44, 46, 46-47, 46-48, 46-49, 46-51, 46-53, 46-55, 46-57, 46-59, 46-60, 46-67, 46-69, 46-75, or 46-79).

[0247] Table 8 provides non-limiting examples of sequences of oligonucleotides that are useful for targeting DMD, e.g., for exon skipping, and for target sequences within DMD. In some embodiments, an oligonucleotide may comprise any antisense sequence provided in Table 8 or a sequence complementary to a target sequence provided in Table 8.

TABLE 8
Oligonucleotide sequences for targeting DMD.

| SEQ | | SEQ | Antisense | SEQ | Antisense | |
|---|---|---|---|---|---|---|
| ID | Target sequence^{†} | ID | Sequence^{†} | ID | Sequence^{†} | |
| NO | (5′ to 3′) | NO | (5′ to 3′) | NO | (5′ to 3′) | Target Site |
| 160 | CUUUGCCAGUACA | 400 | ACCACAUGCAGUU | 640 | ACCACATGCAGTT | Intron 44 |
| | ACUGCAUGUGGU | | GUACUGGCAAAG | | GTACTGGCAAAG | |
| 161 | UUGCCAGUACAAC | 401 | UACCACAUGCAGU | 641 | TACCACATGCAGT | Intron 44 |
| | UGCAUGUGGUA | | UGUACUGGCAA | | TGTACTGGCAA | |
| 162 | UUGCCAGUACAAC | 402 | CUACCACAUGCAG | 642 | CTACCACATGCAG | Intron 44 |
| | UGCAUGUGGUAG | | UUGUACUGGCAA | | TTGTACTGGCAA | |
| 163 | UGCCAGUACAACU | 403 | ACCACAUGCAGUU | 643 | ACCACATGCAGTT | Intron 44 |
| | GCAUGUGGU | | GUACUGGCA | | GTACTGGCA | |
| 164 | UGCCAGUACAACU | 404 | UACCACAUGCAGU | 644 | TACCACATGCAGT | Intron 44 |
| | GCAUGUGGUA | | UGUACUGGCA | | TGTACTGGCA | |
| 165 | UGCCAGUACAACU | 405 | CUACCACAUGCAG | 645 | CTACCACATGCAG | Intron 44 |
| | GCAUGUGGUAG | | UUGUACUGGCA | | TTGTACTGGCA | |
| 166 | UGCCAGUACAACU | 406 | GCUACCACAUGCA | 646 | GCTACCACATGCA | Intron 44 |
| | GCAUGUGGUAGC | | GUUGUACUGGCA | | GTTGTACTGGCA | |
| 167 | GCCAGUACAACUG | 407 | ACCACAUGCAGUU | 647 | ACCACATGCAGTT | Intron 44 |
| | CAUGUGGU | | GUACUGGC | | GTACTGGC | |
| 168 | GCCAGUACAACUG | 408 | UACCACAUGCAGU | 648 | TACCACATGCAGT | Intron 44 |
| | CAUGUGGUA | | UGUACUGGC | | TGTACTGGC | |
| 169 | GCCAGUACAACUG | 409 | CUACCACAUGCAG | 649 | CTACCACATGCAG | Intron 44 |
| | CAUGUGGUAG | | UUGUACUGGC | | TTGTACTGGC | |
| 170 | GCCAGUACAACUG | 410 | GCUACCACAUGCA | 650 | GCTACCACATGCA | Intron 44 |
| | CAUGUGGUAGC | | GUUGUACUGGC | | GTTGTACTGGC | |
| 171 | GCCAGUACAACUG | 411 | UGCUACCACAUGC | 651 | TGCTACCACATGC | Intron 44 |
| | CAUGUGGUAGCA | | AGUUGUACUGGC | | AGTTGTACTGGC | |
| 172 | CCAGUACAACUGC | 412 | CUACCACAUGCAG | 652 | CTACCACATGCAG | Intron 44 |
| | AUGUGGUAG | | UUGUACUGG | | TTGTACTGG | |
| 173 | CCAGUACAACUGC | 413 | GCUACCACAUGCA | 653 | GCTACCACATGCA | Intron 44 |
| | AUGUGGUAGC | | GUUGUACUGG | | GTTGTACTGG | |
| 174 | CCAGUACAACUGC | 414 | UGCUACCACAUGC | 654 | TGCTACCACATGC | Intron 44 |
| | AUGUGGUAGCA | | AGUUGUACUGG | | AGTTGTACTGG | |
| 175 | CAGUACAACUGCA | 415 | GCUACCACAUGCA | 655 | GCTACCACATGCA | Intron 44 |
| | UGUGGUAGC | | GUUGUACUG | | GTTGTACTG | |
| 176 | CAGUACAACUGCA | 416 | UGCUACCACAUGC | 656 | TGCTACCACATGC | Intron 44 |
| | UGUGGUAGCA | | AGUUGUACUG | | AGTTGTACTG | |
| 177 | AGUACAACUGCAU | 417 | GCUACCACAUGCA | 657 | GCTACCACATGCA | Intron 44 |
| | GUGGUAGC | | GUUGUACU | | GTTGTACT | |
| 178 | AGUACAACUGCAU | 418 | UGCUACCACAUGC | 658 | TGCTACCACATGC | Intron 44 |
| | GUGGUAGCA | | AGUUGUACU | | AGTTGTACT | |
| 179 | GUACAACUGCAUG | 419 | GUGCUACCACAUG | 659 | GTGCTACCACATG | Intron 44 |
| | UGGUAGCAC | | CAGUUGUAC | | CAGTTGTAC | |
| 180 | GUACAACUGCAUG | 420 | UGUGCUACCACAU | 660 | TGTGCTACCACAT | Intron 44 |
| | UGGUAGCACA | | GCAGUUGUAC | | GCAGTTGTAC | |
| 181 | AUAAAAAGACAUG | 421 | UGAAGCCCCAUGU | 661 | TGAAGCCCCATGT | Intron 44 |
| | GGGCUUCA | | CUUUUUAU | | CTTTTTAT | |
| 182 | UCUUACAGGAACU | 422 | GCCAUCCUGGAGU | 662 | GCCATCCTGGAGT | Intron 44/exon 45 |
| | CCAGGAUGGC | | UCCUGUAAGA | | TCCTGTAAGA | junction |
| 183 | UCUUACAGGAACU | 423 | UGCCAUCCUGGAG | 663 | TGCCATCCTGGAG | Intron 44/exon 45 |
| | CCAGGAUGGCA | | UUCCUGUAAGA | | TTCCTGTAAGA | junction |
| 184 | UCUUACAGGAACU | 424 | AUGCCAUCCUGGA | 664 | ATGCCATCCTGGA | Intron 44/exon 45 |
| | CCAGGAUGGCAU | | GUUCCUGUAAGA | | GTTCCTGTAAGA | junction |
| 185 | CUUACAGGAACUC | 425 | UGCCAUCCUGGAG | 665 | TGCCATCCTGGAG | Intron 44/exon 45 |
| | CAGGAUGGCA | | UUCCUGUAAG | | TTCCTGTAAG | junction |
| 186 | CUUACAGGAACUC | 426 | AUGCCAUCCUGGA | 666 | ATGCCATCCTGGA | Intron 44/exon 45 |
| | CAGGAUGGCAU | | GUUCCUGUAAG | | GTTCCTGTAAG | junction |
| 187 | CUUACAGGAACUC | 427 | AAUGCCAUCCUGG | 667 | AATGCCATCCTGG | Intron 44/exon 45 |
| | CAGGAUGGCAUU | | AGUUCCUGUAAG | | AGTTCCTGTAAG | junction |
| 188 | UACAGGAACUCCA | 428 | GCCAUCCUGGAGU | 668 | GCCATCCTGGAGT | Intron 44/exon 45 |
| | GGAUGGC | | UCCUGUA | | TCCTGTA | junction |
| 189 | UACAGGAACUCCA | 429 | UGCCAUCCUGGAG | 669 | TGCCATCCTGGAG | Intron 44/exon 45 |
| | GGAUGGCA | | UUCCUGUA | | TTCCTGTA | junction |
| 190 | UACAGGAACUCCA | 430 | AUGCCAUCCUGGA | 670 | ATGCCATCCTGGA | Intron 44/exon 45 |
| | GGAUGGCAU | | GUUCCUGUA | | GTTCCTGTA | junction |
| 191 | UACAGGAACUCCA | 431 | AAUGCCAUCCUGG | 671 | AATGCCATCCTGG | Intron 44/exon 45 |
| | GGAUGGCAUU | | AGUUCCUGUA | | AGTTCCTGTA | junction |
| 192 | UACAGGAACUCCA | 432 | CCAAUGCCAUCCU | 672 | CCAATGCCATCCT | Intron 44/exon 45 |
| | GGAUGGCAUUGG | | GGAGUUCCUGUA | | GGAGTTCCTGTA | junction |
| 193 | ACAGGAACUCCAG | 433 | UGCCAUCCUGGAG | 673 | TGCCATCCTGGAG | Intron 44/exon 45 |
| | GAUGGCA | | UUCCUGU | | TTCCTGT | junction |
| 194 | ACAGGAACUCCAG | 434 | AUGCCAUCCUGGA | 674 | ATGCCATCCTGGA | Intron 44/exon 45 |
| | GAUGGCAU | | GUUCCUGU | | GTTCCTGT | junction |
| 195 | ACAGGAACUCCAG | 435 | AAUGCCAUCCUGG | 675 | AATGCCATCCTGG | Intron 44/exon 45 |
| | GAUGGCAUU | | AGUUCCUGU | | AGTTCCTGT | junction |
| 196 | ACAGGAACUCCAG | 436 | CCAAUGCCAUCCU | 676 | CCAATGCCATCCT | Intron 44/exon 45 |
| | GAUGGCAUUGG | | GGAGUUCCUGU | | GGAGTTCCTGT | junction |
| 197 | ACAGGAACUCCAG | 437 | CCCAAUGCCAUCC | 677 | CCCAATGCCATCC | Intron 44/exon 45 |
| | GAUGGCAUUGGG | | UGGAGUUCCUGU | | TGGAGTTCCTGT | junction |
| 198 | CAGGAACUCCAGG | 438 | AUGCCAUCCUGGA | 678 | ATGCCATCCTGGA | Intron 44/exon 45 |
| | AUGGCAU | | GUUCCUG | | GTTCCTG | junction |
| 199 | CAGGAACUCCAGG | 439 | AAUGCCAUCCUGG | 679 | AATGCCATCCTGG | Intron 44/exon 45 |
| | AUGGCAUU | | AGUUCCUG | | AGTTCCTG | junction |
| 200 | CAGGAACUCCAGG | 440 | CCAAUGCCAUCCU | 680 | CCAATGCCATCCT | Intron 44/exon 45 |
| | AUGGCAUUGG | | GGAGUUCCUG | | GGAGTTCCTG | junction |
| 201 | CAGGAACUCCAGG | 441 | CCCAAUGCCAUCC | 681 | CCCAATGCCATCC | Intron 44/exon 45 |
| | AUGGCAUUGGG | | UGGAGUUCCUG | | TGGAGTTCCTG | junction |
| 202 | CAGGAACUCCAGG | 442 | GCCCAAUGCCAUC | 682 | GCCCAATGCCATC | Intron 44/exon 45 |
| | AUGGCAUUGGGC | | CUGGAGUUCCUG | | CTGGAGTTCCTG | junction |
| 203 | AGGAACUCCAGGA | 443 | AAUGCCAUCCUGG | 683 | AATGCCATCCTGG | Intron 44/exon 45 |
| | UGGCAUU | | AGUUCCU | | AGTTCCT | junction |
| 204 | AGGAACUCCAGGA | 444 | CCAAUGCCAUCCU | 684 | CCAATGCCATCCT | Intron 44/exon 45 |
| | UGGCAUUGG | | GGAGUUCCU | | GGAGTTCCT | junction |
| 205 | AGGAACUCCAGGA | 445 | CCCAAUGCCAUCC | 685 | CCCAATGCCATCC | Intron 44/exon 45 |
| | UGGCAUUGGG | | UGGAGUUCCU | | TGGAGTTCCT | junction |
| 206 | AGGAACUCCAGGA | 446 | GCCCAAUGCCAUC | 686 | GCCCAATGCCATC | Intron 44/exon 45 |
| | UGGCAUUGGGC | | CUGGAGUUCCU | | CTGGAGTTCCT | junction |
| 207 | AGGAACUCCAGGA | 447 | UGCCCAAUGCCAU | 687 | TGCCCAATGCCAT | Intron 44/exon 45 |
| | UGGCAUUGGGCA | | CCUGGAGUUCCU | | CCTGGAGTTCCT | junction |
| 208 | GGAACUCCAGGAU | 448 | CCAAUGCCAUCCU | 688 | CCAATGCCATCCT | Intron 44/exon 45 |
| | GGCAUUGG | | GGAGUUCC | | GGAGTTCC | junction |
| 209 | GGAACUCCAGGAU | 449 | CCCAAUGCCAUCC | 689 | CCCAATGCCATCC | Intron 44/exon 45 |
| | GGCAUUGGG | | UGGAGUUCC | | TGGAGTTCC | junction |
| 210 | GGAACUCCAGGAU | 450 | UGCCCAAUGCCAU | 690 | TGCCCAATGCCAT | Intron 44/exon 45 |
| | GGCAUUGGGCA | | CCUGGAGUUCC | | CCTGGAGTTCC | junction |
| 211 | GGAACUCCAGGAU | 451 | CUGCCCAAUGCCA | 691 | CTGCCCAATGCCA | Intron 44/exon 45 |
| | GGCAUUGGGCAG | | UCCUGGAGUUCC | | TCCTGGAGTTCC | junction |
| 212 | GAACUCCAGGAUG | 452 | CCAAUGCCAUCCU | 692 | CCAATGCCATCCT | Exon 45 |
| | GCAUUGG | | GGAGUUC | | GGAGTTC | |
| 213 | GAACUCCAGGAUG | 453 | CCCAAUGCCAUCC | 693 | CCCAATGCCATCC | Exon 45 |
| | GCAUUGGG | | UGGAGUUC | | TGGAGTTC | |
| 214 | GAACUCCAGGAUG | 454 | GCCCAAUGCCAUC | 694 | GCCCAATGCCATC | Exon 45 |
| | GCAUUGGGC | | CUGGAGUUC | | CTGGAGTTC | |
| 215 | GAACUCCAGGAUG | 455 | UGCCCAAUGCCAU | 695 | TGCCCAATGCCAT | Exon 45 |
| | GCAUUGGGCA | | CCUGGAGUUC | | CCTGGAGTTC | |
| 216 | GAACUCCAGGAUG | 456 | CUGCCCAAUGCCA | 696 | CTGCCCAATGCCA | Exon 45 |
| | GCAUUGGGCAG | | UCCUGGAGUUC | | TCCTGGAGTTC | |
| 217 | GAACUCCAGGAUG | 457 | GCUGCCCAAUGCC | 697 | GCTGCCCAATGCC | Exon 45 |
| | GCAUUGGGCAGC | | AUCCUGGAGUUC | | ATCCTGGAGTTC | |
| 218 | AACUCCAGGAUGG | 458 | CCCAAUGCCAUCC | 698 | CCCAATGCCATCC | Exon 45 |
| | CAUUGGG | | UGGAGUU | | TGGAGTT | |
| 219 | AACUCCAGGAUGG | 459 | GCCCAAUGCCAUC | 699 | GCCCAATGCCATC | Exon 45 |
| | CAUUGGGC | | CUGGAGUU | | CTGGAGTT | |
| 220 | AACUCCAGGAUGG | 460 | UGCCCAAUGCCAU | 700 | TGCCCAATGCCAT | Exon 45 |
| | CAUUGGGCA | | CCUGGAGUU | | CCTGGAGTT | |
| 221 | AACUCCAGGAUGG | 461 | CUGCCCAAUGCCA | 701 | CTGCCCAATGCCA | Exon 45 |
| | CAUUGGGCAG | | UCCUGGAGUU | | TCCTGGAGTT | |
| 222 | AACUCCAGGAUGG | 462 | GCUGCCCAAUGCC | 702 | GCTGCCCAATGCC | Exon 45 |
| | CAUUGGGCAGC | | AUCCUGGAGUU | | ATCCTGGAGTT | |
| 223 | ACUCCAGGAUGGC | 463 | GCCCAAUGCCAUC | 703 | GCCCAATGCCATC | Exon 45 |
| | AUUGGGC | | CUGGAGU | | CTGGAGT | |
| 224 | ACUCCAGGAUGGC | 464 | UGCCCAAUGCCAU | 704 | TGCCCAATGCCAT | Exon 45 |
| | AUUGGGCA | | CCUGGAGU | | CCTGGAGT | |
| 225 | ACUCCAGGAUGGC | 465 | CUGCCCAAUGCCA | 705 | CTGCCCAATGCCA | Exon 45 |
| | AUUGGGCAG | | UCCUGGAGU | | TCCTGGAGT | |
| 226 | CUCCAGGAUGGCA | 466 | UGCCCAAUGCCAU | 706 | TGCCCAATGCCAT | Exon 45 |
| | UUGGGCA | | CCUGGAG | | CCTGGAG | |
| 227 | CAGAACAUUGAAU | 467 | UCCCCAGUUGCAU | 707 | TCCCCAGTTGCAT | Exon 45 |
| | GCAACUGGGGA | | UCAAUGUUCUG | | TCAATGTTCTG | |
| 228 | AGAACAUUGAAUG | 468 | UCCCCAGUUGCAU | 708 | TCCCCAGTTGCAT | Exon 45 |
| | CAACUGGGGA | | UCAAUGUUCU | | TCAATGTTCT | |
| 229 | AGAACAUUGAAUG | 469 | CUUCCCCAGUUGC | 709 | CTTCCCCAGTTGC | Exon 45 |
| | CAACUGGGGAAG | | AUUCAAUGUUCU | | ATTCAATGTTCT | |
| 230 | GAACAUUGAAUGC | 470 | UCUUCCCCAGUUG | 710 | TCTTCCCCAGTTG | Exon 45 |
| | AACUGGGGAAGA | | CAUUCAAUGUUC | | CATTCAATGTTC | |
| 231 | CAUUGAAUGCAAC | 471 | AUUUCUUCCCCAG | 711 | ATTTCTTCCCCAG | Exon 45 |
| | UGGGGAAGAAAU | | UUGCAUUCAAUG | | TTGCATTCAATG | |
| 232 | AUUGAAUGCAACU | 472 | AUUUCUUCCCCAG | 712 | ATTTCTTCCCCAG | Exon 45 |
| | GGGGAAGAAAU | | UUGCAUUCAAU | | TTGCATTCAAT | |
| 233 | AUUGAAUGCAACU | 473 | UAUUUCUUCCCCA | 713 | TATTTCTTCCCCA | Exon 45 |
| | GGGGAAGAAAUA | | GUUGCAUUCAAU | | GTTGCATTCAAT | |
| 234 | UUGAAUGCAACUG | 474 | AUUUCUUCCCCAG | 714 | ATTTCTTCCCCAG | Exon 45 |
| | GGGAAGAAAU | | UUGCAUUCAA | | TTGCATTCAA | |
| 235 | UUGAAUGCAACUG | 475 | UAUUUCUUCCCCA | 715 | TATTTCTTCCCCA | Exon 45 |
| | GGGAAGAAAUA | | GUUGCAUUCAA | | GTTGCATTCAA | |
| 236 | UUGAAUGCAACUG | 476 | UUAUUUCUUCCCC | 716 | TTATTTCTTCCCC | Exon 45 |
| | GGGAAGAAAUAA | | AGUUGCAUUCAA | | AGTTGCATTCAA | |
| 237 | UGAAUGCAACUGG | 477 | UUCUUCCCCAGUU | 717 | TTCTTCCCCAGTT | Exon 45 |
| | GGAAGAA | | GCAUUCA | | GCATTCA | |
| 238 | UGAAUGCAACUGG | 478 | AUUUCUUCCCCAG | 718 | ATTTCTTCCCCAG | Exon 45 |
| | GGAAGAAAU | | UUGCAUUCA | | TTGCATTCA | |
| 239 | UGAAUGCAACUGG | 479 | UAUUUCUUCCCCA | 719 | TATTTCTTCCCCA | Exon 45 |
| | GGAAGAAAUA | | GUUGCAUUCA | | GTTGCATTCA | |
| 240 | UGAAUGCAACUGG | 480 | UUAUUUCUUCCCC | 720 | TTATTTCTTCCCC | Exon 45 |
| | GGAAGAAAUAA | | AGUUGCAUUCA | | AGTTGCATTCA | |
| 241 | GAAUGCAACUGGG | 481 | AUUUCUUCCCCAG | 721 | ATTTCTTCCCCAG | Exon 45 |
| | GAAGAAAU | | UUGCAUUC | | TTGCATTC | |
| 242 | GAAUGCAACUGGG | 482 | UAUUUCUUCCCCA | 722 | TATTTCTTCCCCA | Exon 45 |
| | GAAGAAAUA | | GUUGCAUUC | | GTTGCATTC | |
| 243 | GAAUGCAACUGGG | 483 | UUAUUUCUUCCCC | 723 | TTATTTCTTCCCC | Exon 45 |
| | GAAGAAAUAA | | AGUUGCAUUC | | AGTTGCATTC | |
| 244 | AAUGCAACUGGGG | 484 | UAUUUCUUCCCCA | 724 | TATTTCTTCCCCA | Exon 45 |
| | AAGAAAUA | | GUUGCAUU | | GTTGCATT | |
| 245 | AUGCAACUGGGGA | 485 | UAUUUCUUCCCCA | 725 | TATTTCTTCCCCA | Exon 45 |
| | AGAAAUA | | GUUGCAU | | GTTGCAT | |
| 246 | AUGCAACUGGGGA | 486 | UUAUUUCUUCCCC | 726 | TTATTTCTTCCCC | Exon 45 |
| | AGAAAUAA | | AGUUGCAU | | AGTTGCAT | |
| 247 | AUGCAACUGGGGA | 487 | AUUAUUUCUUCCC | 727 | ATTATTTCTTCCC | Exon 45 |
| | AGAAAUAAU | | CAGUUGCAU | | CAGTTGCAT | |
| 248 | AAUUCAGCAAUCC | 488 | UCUGUUUUUGAGG | 728 | TCTGTTTTTGAGG | Exon 45 |
| | UCAAAAACAGA | | AUUGCUGAAUU | | ATTGCTGAATT | |
| 249 | AAUUCAGCAAUCC | 489 | AUCUGUUUUUGAG | 729 | ATCTGTTTTTGAG | Exon 45 |
| | UCAAAAACAGAU | | GAUUGCUGAAUU | | GATTGCTGAATT | |
| 250 | AUUCAGCAAUCCU | 490 | CUGUUUUUGAGGA | 730 | CTGTTTTTGAGGA | Exon 45 |
| | CAAAAACAG | | UUGCUGAAU | | TTGCTGAAT | |
| 251 | AUUCAGCAAUCCU | 491 | UCUGUUUUUGAGG | 731 | TCTGTTTTTGAGG | Exon 45 |
| | CAAAAACAGA | | AUUGCUGAAU | | ATTGCTGAAT | |
| 252 | AUUCAGCAAUCCU | 492 | AUCUGUUUUUGAG | 732 | ATCTGTTTTTGAG | Exon 45 |
| | CAAAAACAGAU | | GAUUGCUGAAU | | GATTGCTGAAT | |
| 253 | AUUCAGCAAUCCU | 493 | CAUCUGUUUUUGA | 733 | CATCTGTTTTTGA | Exon 45 |
| | CAAAAACAGAUG | | GGAUUGCUGAAU | | GGATTGCTGAAT | |
| 254 | UUCAGCAAUCCUC | 494 | UCUGUUUUUGAGG | 734 | TCTGTTTTTGAGG | Exon 45 |
| | AAAAACAGA | | AUUGCUGAA | | ATTGCTGAA | |
| 255 | UUCAGCAAUCCUC | 495 | AUCUGUUUUUGAG | 735 | ATCTGTTTTTGAG | Exon 45 |
| | AAAAACAGAU | | GAUUGCUGAA | | GATTGCTGAA | |
| 256 | UUCAGCAAUCCUC | 496 | CAUCUGUUUUUGA | 736 | CATCTGTTTTTGA | Exon 45 |
| | AAAAACAGAUG | | GGAUUGCUGAA | | GGATTGCTGAA | |
| 257 | UCAGCAAUCCUCA | 497 | CUGUUUUUGAGGA | 737 | CTGTTTTTGAGGA | Exon 45 |
| | AAAACAG | | UUGCUGA | | TTGCTGA | |
| 258 | UCAGCAAUCCUCA | 498 | UCUGUUUUUGAGG | 738 | TCTGTTTTTGAGG | Exon 45 |
| | AAAACAGA | | AUUGCUGA | | ATTGCTGA | |
| 259 | UCAGCAAUCCUCA | 499 | AUCUGUUUUUGAG | 739 | ATCTGTTTTTGAG | Exon 45 |
| | AAAACAGAU | | GAUUGCUGA | | GATTGCTGA | |
| 260 | UCAGCAAUCCUCA | 500 | CAUCUGUUUUUGA | 740 | CATCTGTTTTTGA | Exon 45 |
| | AAAACAGAUG | | GGAUUGCUGA | | GGATTGCTGA | |
| 261 | CAGCAAUCCUCAA | 501 | UCUGUUUUUGAGG | 741 | TCTGTTTTTGAGG | Exon 45 |
| | AAACAGA | | AUUGCUG | | ATTGCTG | |
| 262 | CAGCAAUCCUCAA | 502 | AUCUGUUUUUGAG | 742 | ATCTGTTTTTGAG | Exon 45 |
| | AAACAGAU | | GAUUGCUG | | GATTGCTG | |
| 263 | CAGCAAUCCUCAA | 503 | CAUCUGUUUUUGA | 743 | CATCTGTTTTTGA | Exon 45 |
| | AAACAGAUG | | GGAUUGCUG | | GGATTGCTG | |
| 264 | AGCAAUCCUCAAA | 504 | AUCUGUUUUUGAG | 744 | ATCTGTTTTTGAG | Exon 45 |
| | AACAGAU | | GAUUGCU | | GATTGCT | |
| 265 | AGCAAUCCUCAAA | 505 | CAUCUGUUUUUGA | 745 | CATCTGTTTTTGA | Exon 45 |
| | AACAGAUG | | GGAUUGCU | | GGATTGCT | |
| 266 | GCAAUCCUCAAAA | 506 | GCAUCUGUUUUUG | 746 | GCATCTGTTTTTG | Exon 45 |
| | ACAGAUGC | | AGGAUUGC | | AGGATTGC | |
| 267 | GCAAUCCUCAAAA | 507 | GGCAUCUGUUUUU | 747 | GGCATCTGTTTTT | Exon 45 |
| | ACAGAUGCC | | GAGGAUUGC | | GAGGATTGC | |
| 268 | GCAAUCCUCAAAA | 508 | UGGCAUCUGUUUU | 748 | TGGCATCTGTTTT | Exon 45 |
| | ACAGAUGCCA | | UGAGGAUUGC | | TGAGGATTGC | |
| 269 | CAAUCCUCAAAAA | 509 | GGCAUCUGUUUUU | 749 | GGCATCTGTTTTT | Exon 45 |
| | CAGAUGCC | | GAGGAUUG | | GAGGATTG | |
| 270 | CAAUCCUCAAAAA | 510 | UGGCAUCUGUUUU | 750 | TGGCATCTGTTTT | Exon 45 |
| | CAGAUGCCA | | UGAGGAUUG | | TGAGGATTG | |
| 271 | CAAUCCUCAAAAA | 511 | UACUGGCAUCUGU | 751 | TACTGGCATCTGT | Exon 45 |
| | CAGAUGCCAGUA | | UUUUGAGGAUUG | | TTTTGAGGATTG | |
| 272 | AAUCCUCAAAAAC | 512 | GGCAUCUGUUUUU | 752 | GGCATCTGTTTTT | Exon 45 |
| | AGAUGCC | | GAGGAUU | | GAGGATT | |
| 273 | AAUCCUCAAAAAC | 513 | UGGCAUCUGUUUU | 753 | TGGCATCTGTTTT | Exon 45 |
| | AGAUGCCA | | UGAGGAUU | | TGAGGATT | |
| 274 | AAUCCUCAAAAAC | 514 | UACUGGCAUCUGU | 754 | TACTGGCATCTGT | Exon 45 |
| | AGAUGCCAGUA | | UUUUGAGGAUU | | TTTTGAGGATT | |
| 275 | AAUCCUCAAAAAC | 515 | AUACUGGCAUCUG | 755 | ATACTGGCATCTG | Exon 45 |
| | AGAUGCCAGUAU | | UUUUUGAGGAUU | | TTTTTGAGGATT | |
| 276 | AUCCUCAAAAACA | 516 | UGGCAUCUGUUUU | 756 | TGGCATCTGTTTT | Exon 45 |
| | GAUGCCA | | UGAGGAU | | TGAGGAT | |
| 277 | AUCCUCAAAAACA | 517 | UACUGGCAUCUGU | 757 | TACTGGCATCTGT | Exon 45 |
| | GAUGCCAGUA | | UUUUGAGGAU | | TTTTGAGGAT | |
| 278 | AUCCUCAAAAACA | 518 | AUACUGGCAUCUG | 758 | ATACTGGCATCTG | Exon 45 |
| | GAUGCCAGUAU | | UUUUUGAGGAU | | TTTTTGAGGAT | |
| 279 | AUCCUCAAAAACA | 519 | AAUACUGGCAUCU | 759 | AATACTGGCATCT | Exon 45 |
| | GAUGCCAGUAUU | | GUUUUUGAGGAU | | GTTTTTGAGGAT | |
| 280 | UCCUCAAAAACAG | 520 | UACUGGCAUCUGU | 760 | TACTGGCATCTGT | Exon 45 |
| | AUGCCAGUA | | UUUUGAGGA | | TTTTGAGGA | |
| 281 | UCCUCAAAAACAG | 521 | AUACUGGCAUCUG | 761 | ATACTGGCATCTG | Exon 45 |
| | AUGCCAGUAU | | UUUUUGAGGA | | TTTTTGAGGA | |
| 282 | UCCUCAAAAACAG | 522 | AAUACUGGCAUCU | 762 | AATACTGGCATCT | Exon 45 |
| | AUGCCAGUAUU | | GUUUUUGAGGA | | GTTTTTGAGGA | |
| 283 | CCUCAAAAACAGA | 523 | UACUGGCAUCUGU | 763 | TACTGGCATCTGT | Exon 45 |
| | UGCCAGUA | | UUUUGAGG | | TTTTGAGG | |
| 284 | CCUCAAAAACAGA | 524 | AUACUGGCAUCUG | 764 | ATACTGGCATCTG | Exon 45 |
| | UGCCAGUAU | | UUUUUGAGG | | TTTTTGAGG | |
| 285 | CCUCAAAAACAGA | 525 | AAUACUGGCAUCU | 765 | AATACTGGCATCT | Exon 45 |
| | UGCCAGUAUU | | GUUUUUGAGG | | GTTTTTGAGG | |
| 286 | CCUCAAAAACAGA | 526 | AGAAUACUGGCAU | 766 | AGAATACTGGCAT | Exon 45 |
| | UGCCAGUAUUCU | | CUGUUUUUGAGG | | CTGTTTTTGAGG | |
| 287 | CUCAAAAACAGAU | 527 | UACUGGCAUCUGU | 767 | TACTGGCATCTGT | Exon 45 |
| | GCCAGUA | | UUUUGAG | | TTTTGAG | |
| 288 | CUCAAAAACAGAU | 528 | AUACUGGCAUCUG | 768 | ATACTGGCATCTG | Exon 45 |
| | GCCAGUAU | | UUUUUGAG | | TTTTTGAG | |
| 289 | CUCAAAAACAGAU | 529 | AAUACUGGCAUCU | 769 | AATACTGGCATCT | Exon 45 |
| | GCCAGUAUU | | GUUUUUGAG | | GTTTTTGAG | |
| 290 | CUCAAAAACAGAU | 530 | AGAAUACUGGCAU | 770 | AGAATACTGGCAT | Exon 45 |
| | GCCAGUAUUCU | | CUGUUUUUGAG | | CTGTTTTTGAG | |
| 291 | CUCAAAAACAGAU | 531 | UAGAAUACUGGCA | 771 | TAGAATACTGGCA | Exon 45 |
| | GCCAGUAUUCUA | | UCUGUUUUUGAG | | TCTGTTTTTGAG | |
| 292 | UCAAAAACAGAUG | 532 | AUACUGGCAUCUG | 772 | ATACTGGCATCTG | Exon 45 |
| | CCAGUAU | | UUUUUGA | | TTTTTGA | |
| 293 | UCAAAAACAGAUG | 533 | AAUACUGGCAUCU | 773 | AATACTGGCATCT | Exon 45 |
| | CCAGUAUU | | GUUUUUGA | | GTTTTTGA | |
| 294 | UCAAAAACAGAUG | 534 | AGAAUACUGGCAU | 774 | AGAATACTGGCAT | Exon 45 |
| | CCAGUAUUCU | | CUGUUUUUGA | | CTGTTTTTGA | |
| 295 | UCAAAAACAGAUG | 535 | UAGAAUACUGGCA | 775 | TAGAATACTGGCA | Exon 45 |
| | CCAGUAUUCUA | | UCUGUUUUUGA | | TCTGTTTTTGA | |
| 296 | UCAAAAACAGAUG | 536 | GUAGAAUACUGGC | 776 | GTAGAATACTGGC | Exon 45 |
| | CCAGUAUUCUAC | | AUCUGUUUUUGA | | ATCTGTTTTTGA | |
| 297 | CAAAAACAGAUGC | 537 | AGAAUACUGGCAU | 777 | AGAATACTGGCAT | Exon 45 |
| | CAGUAUUCU | | CUGUUUUUG | | CTGTTTTTG | |
| 298 | CAAAAACAGAUGC | 538 | UAGAAUACUGGCA | 778 | TAGAATACTGGCA | Exon 45 |
| | CAGUAUUCUA | | UCUGUUUUUG | | TCTGTTTTTG | |
| 299 | CAAAAACAGAUGC | 539 | GUAGAAUACUGGC | 779 | GTAGAATACTGGC | Exon 45 |
| | CAGUAUUCUAC | | AUCUGUUUUUG | | ATCTGTTTTTG | |
| 300 | CAAAAACAGAUGC | 540 | UGUAGAAUACUGG | 780 | TGTAGAATACTGG | Exon 45 |
| | CAGUAUUCUACA | | CAUCUGUUUUUG | | CATCTGTTTTTG | |
| 301 | AAAAACAGAUGCC | 541 | GUAGAAUACUGGC | 781 | GTAGAATACTGGC | Exon 45 |
| | AGUAUUCUAC | | AUCUGUUUUU | | ATCTGTTTTT | |
| 302 | AAAAACAGAUGCC | 542 | UGUAGAAUACUGG | 782 | TGTAGAATACTGG | Exon 45 |
| | AGUAUUCUACA | | CAUCUGUUUUU | | CATCTGTTTTT | |
| 303 | AAAAACAGAUGCC | 543 | CUGUAGAAUACUG | 783 | CTGTAGAATACTG | Exon 45 |
| | AGUAUUCUACAG | | GCAUCUGUUUUU | | GCATCTGTTTTT | |
| 304 | AAAACAGAUGCCA | 544 | GUAGAAUACUGGC | 784 | GTAGAATACTGGC | Exon 45 |
| | GUAUUCUAC | | AUCUGUUUU | | ATCTGTTTT | |
| 305 | AAAACAGAUGCCA | 545 | UGUAGAAUACUGG | 785 | TGTAGAATACTGG | Exon 45 |
| | GUAUUCUACA | | CAUCUGUUUU | | CATCTGTTTT | |
| 306 | AAAACAGAUGCCA | 546 | CUGUAGAAUACUG | 786 | CTGTAGAATACTG | Exon 45 |
| | GUAUUCUACAG | | GCAUCUGUUUU | | GCATCTGTTTT | |
| 307 | AAAACAGAUGCCA | 547 | CCUGUAGAAUACU | 787 | CCTGTAGAATACT | Exon 45 |
| | GUAUUCUACAGG | | GGCAUCUGUUUU | | GGCATCTGTTTT | |
| 308 | AAACAGAUGCCAG | 548 | GUAGAAUACUGGC | 788 | GTAGAATACTGGC | Exon 45 |
| | UAUUCUAC | | AUCUGUUU | | ATCTGTTT | |
| 309 | AAACAGAUGCCAG | 549 | UGUAGAAUACUGG | 789 | TGTAGAATACTGG | Exon 45 |
| | UAUUCUACA | | CAUCUGUUU | | CATCTGTTT | |
| 310 | AAACAGAUGCCAG | 550 | CUGUAGAAUACUG | 790 | CTGTAGAATACTG | Exon 45 |
| | UAUUCUACAG | | GCAUCUGUUU | | GCATCTGTTT | |
| 311 | AAACAGAUGCCAG | 551 | CCUGUAGAAUACU | 791 | CCTGTAGAATACT | Exon 45 |
| | UAUUCUACAGG | | GGCAUCUGUUU | | GGCATCTGTTT | |
| 312 | AAACAGAUGCCAG | 552 | UCCUGUAGAAUAC | 792 | TCCTGTAGAATAC | Exon 45 |
| | UAUUCUACAGGA | | UGGCAUCUGUUU | | TGGCATCTGTTT | |
| 313 | AACAGAUGCCAGU | 553 | GUAGAAUACUGGC | 793 | GTAGAATACTGGC | Exon 45 |
| | AUUCUAC | | AUCUGUU | | ATCTGTT | |
| 314 | AACAGAUGCCAGU | 554 | UGUAGAAUACUGG | 794 | TGTAGAATACTGG | Exon 45 |
| | AUUCUACA | | CAUCUGUU | | CATCTGTT | |
| 315 | AACAGAUGCCAGU | 555 | CUGUAGAAUACUG | 795 | CTGTAGAATACTG | Exon 45 |
| | AUUCUACAG | | GCAUCUGUU | | GCATCTGTT | |
| 316 | AACAGAUGCCAGU | 556 | CCUGUAGAAUACU | 796 | CCTGTAGAATACT | Exon 45 |
| | AUUCUACAGG | | GGCAUCUGUU | | GGCATCTGTT | |
| 317 | AACAGAUGCCAGU | 557 | UCCUGUAGAAUAC | 797 | TCCTGTAGAATAC | Exon 45 |
| | AUUCUACAGGA | | UGGCAUCUGUU | | TGGCATCTGTT | |
| 318 | AACAGAUGCCAGU | 558 | UUCCUGUAGAAUA | 798 | TTCCTGTAGAATA | Exon 45 |
| | AUUCUACAGGAA | | CUGGCAUCUGUU | | CTGGCATCTGTT | |
| 319 | ACAGAUGCCAGUA | 559 | UGUAGAAUACUGG | 799 | TGTAGAATACTGG | Exon 45 |
| | UUCUACA | | CAUCUGU | | CATCTGT | |
| 320 | ACAGAUGCCAGUA | 560 | CUGUAGAAUACUG | 800 | CTGTAGAATACTG | Exon 45 |
| | UUCUACAG | | GCAUCUGU | | GCATCTGT | |
| 321 | ACAGAUGCCAGUA | 561 | CCUGUAGAAUACU | 801 | CCTGTAGAATACT | Exon 45 |
| | UUCUACAGG | | GGCAUCUGU | | GGCATCTGT | |
| 322 | ACAGAUGCCAGUA | 562 | UCCUGUAGAAUAC | 802 | TCCTGTAGAATAC | Exon 45 |
| | UUCUACAGGA | | UGGCAUCUGU | | TGGCATCTGT | |
| 323 | ACAGAUGCCAGUA | 563 | UUCCUGUAGAAUA | 803 | TTCCTGTAGAATA | Exon 45 |
| | UUCUACAGGAA | | CUGGCAUCUGU | | CTGGCATCTGT | |
| 324 | CAGAUGCCAGUAU | 564 | UCCUGUAGAAUAC | 804 | TCCTGTAGAATAC | Exon 45 |
| | UCUACAGGA | | UGGCAUCUG | | TGGCATCTG | |
| 325 | CAGAUGCCAGUAU | 565 | UUCCUGUAGAAUA | 805 | TTCCTGTAGAATA | Exon 45 |
| | UCUACAGGAA | | CUGGCAUCUG | | CTGGCATCTG | |
| 326 | CAGAUGCCAGUAU | 566 | UUUUCCUGUAGAA | 806 | TTTTCCTGTAGAA | Exon 45 |
| | UCUACAGGAAAA | | UACUGGCAUCUG | | TACTGGCATCTG | |
| 327 | AGAUGCCAGUAUU | 567 | UUCCUGUAGAAUA | 807 | TTCCTGTAGAATA | Exon 45 |
| | CUACAGGAA | | CUGGCAUCU | | CTGGCATCT | |
| 328 | AGAUGCCAGUAUU | 568 | UUUUCCUGUAGAA | 808 | TTTTCCTGTAGAA | Exon 45 |
| | CUACAGGAAAA | | UACUGGCAUCU | | TACTGGCATCT | |
| 329 | AGAUGCCAGUAUU | 569 | UUUUUCCUGUAGA | 809 | TTTTTCCTGTAGA | Exon 45 |
| | CUACAGGAAAAA | | AUACUGGCAUCU | | ATACTGGCATCT | |
| 330 | GAUGCCAGUAUUC | 570 | UUUUCCUGUAGAA | 810 | TTTTCCTGTAGAA | Exon 45 |
| | UACAGGAAAA | | UACUGGCAUC | | TACTGGCATC | |
| 331 | GAUGCCAGUAUUC | 571 | UUUUUCCUGUAGA | 811 | TTTTTCCTGTAGA | Exon 45 |
| | UACAGGAAAAA | | AUACUGGCAUC | | ATACTGGCATC | |
| 332 | GAUGCCAGUAUUC | 572 | AUUUUUCCUGUAG | 812 | ATTTTTCCTGTAG | Exon 45 |
| | UACAGGAAAAAU | | AAUACUGGCAUC | | AATACTGGCATC | |
| 333 | CAGAAAAAAGAGG | 573 | UGUCGCCCUACCU | 813 | TGTCGCCCTACCT | Exon 45/intron 45 |
| | UAGGGCGACA | | CUUUUUUCUG | | CTTTTTTCTG | junction |
| 334 | CAGAAAAAAGAGG | 574 | CUGUCGCCCUACC | 814 | CTGTCGCCCTACC | Exon 45/intron 45 |
| | UAGGGCGACAG | | UCUUUUUUCUG | | TCTTTTTTCTG | junction |
| 335 | CAGAAAAAAGAGG | 575 | UCUGUCGCCCUAC | 815 | TCTGTCGCCCTAC | Exon 45/intron 45 |
| | UAGGGCGACAGA | | CUCUUUUUUCUG | | CTCTTTTTTCTG | junction |
| 336 | AGAAAAAAGAGGU | 576 | UGUCGCCCUACCU | 816 | TGTCGCCCTACCT | Exon 45/intron 45 |
| | AGGGCGACA | | CUUUUUUCU | | CTTTTTTCT | junction |
| 337 | AGAAAAAAGAGGU | 577 | CUGUCGCCCUACC | 817 | CTGTCGCCCTACC | Exon 45/intron 45 |
| | AGGGCGACAG | | UCUUUUUUCU | | TCTTTTTTCT | junction |
| 338 | AGAAAAAAGAGGU | 578 | UCUGUCGCCCUAC | 818 | TCTGTCGCCCTAC | Exon 45/intron 45 |
| | AGGGCGACAGA | | CUCUUUUUUCU | | CTCTTTTTTCT | junction |
| 339 | AGAAAAAAGAGGU | 579 | AUCUGUCGCCCUA | 819 | ATCTGTCGCCCTA | Exon 45/intron 45 |
| | AGGGCGACAGAU | | CCUCUUUUUUCU | | CCTCTTTTTTCT | junction |
| 340 | GAAAAAAGAGGUA | 580 | UGUCGCCCUACCU | 820 | TGTCGCCCTACCT | Exon 45/intron 45 |
| | GGGCGACA | | CUUUUUUC | | CTTTTTTC | junction |
| 341 | GAAAAAAGAGGUA | 581 | CUGUCGCCCUACC | 821 | CTGTCGCCCTACC | Exon 45/intron 45 |
| | GGGCGACAG | | UCUUUUUUC | | TCTTTTTTC | junction |
| 342 | GAAAAAAGAGGUA | 582 | UCUGUCGCCCUAC | 822 | TCTGTCGCCCTAC | Exon 45/intron 45 |
| | GGGCGACAGA | | CUCUUUUUUC | | CTCTTTTTTC | junction |
| 343 | GAAAAAAGAGGUA | 583 | AUCUGUCGCCCUA | 823 | ATCTGTCGCCCTA | Exon 45/intron 45 |
| | GGGCGACAGAU | | CCUCUUUUUUC | | CCTCTTTTTTC | junction |
| 344 | GAAAAAAGAGGUA | 584 | GAUCUGUCGCCCU | 824 | GATCTGTCGCCCT | Exon 45/intron 45 |
| | GGGCGACAGAUC | | ACCUCUUUUUUC | | ACCTCTTTTTTC | junction |
| 345 | AAAAAAGAGGUAG | 585 | UGUCGCCCUACCU | 825 | TGTCGCCCTACCT | Exon 45/intron 45 |
| | GGCGACA | | CUUUUUU | | CTTTTTT | junction |
| 346 | AAAAAAGAGGUAG | 586 | CUGUCGCCCUACC | 826 | CTGTCGCCCTACC | Exon 45/intron 45 |
| | GGCGACAG | | UCUUUUUU | | TCTTTTTT | junction |
| 347 | AAAAAAGAGGUAG | 587 | UCUGUCGCCCUAC | 827 | TCTGTCGCCCTAC | Exon 45/intron 45 |
| | GGCGACAGA | | CUCUUUUUU | | CTCTTTTTT | junction |
| 348 | AAAAAAGAGGUAG | 588 | AUCUGUCGCCCUA | 828 | ATCTGTCGCCCTA | Exon 45/intron 45 |
| | GGCGACAGAU | | CCUCUUUUUU | | CCTCTTTTTT | junction |
| 349 | AAAAAAGAGGUAG | 589 | GAUCUGUCGCCCU | 829 | GATCTGTCGCCCT | Exon 45/intron 45 |
| | GGCGACAGAUC | | ACCUCUUUUUU | | ACCTCTTTTTT | junction |
| 350 | AAAAAAGAGGUAG | 590 | AGAUCUGUCGCCC | 830 | AGATCTGTCGCCC | Exon 45/intron 45 |
| | GGCGACAGAUCU | | UACCUCUUUUUU | | TACCTCTTTTTT | junction |
| 351 | AAAAAGAGGUAGG | 591 | CUGUCGCCCUACC | 831 | CTGTCGCCCTACC | Exon 45/intron 45 |
| | GCGACAG | | UCUUUUU | | TCTTTTT | junction |
| 352 | AAAAAGAGGUAGG | 592 | UCUGUCGCCCUAC | 832 | TCTGTCGCCCTAC | Exon 45/intron 45 |
| | GCGACAGA | | CUCUUUUU | | CTCTTTTT | junction |
| 353 | AAAAAGAGGUAGG | 593 | AUCUGUCGCCCUA | 833 | ATCTGTCGCCCTA | Exon 45/intron 45 |
| | GCGACAGAU | | CCUCUUUUU | | CCTCTTTTT | junction |
| 354 | AAAAAGAGGUAGG | 594 | GAUCUGUCGCCCU | 834 | GATCTGTCGCCCT | Exon 45/intron 45 |
| | GCGACAGAUC | | ACCUCUUUUU | | ACCTCTTTTT | junction |
| 355 | AAAAAGAGGUAGG | 595 | AGAUCUGUCGCCC | 835 | AGATCTGTCGCCC | Exon 45/intron 45 |
| | GCGACAGAUCU | | UACCUCUUUUU | | TACCTCTTTTT | junction |
| 356 | AAAAGAGGUAGGG | 596 | UCUGUCGCCCUAC | 836 | TCTGTCGCCCTAC | Exon 45/intron 45 |
| | CGACAGA | | CUCUUUU | | CTCTTTT | junction |
| 357 | AAAAGAGGUAGGG | 597 | AUCUGUCGCCCUA | 837 | ATCTGTCGCCCTA | Exon 45/intron 45 |
| | CGACAGAU | | CCUCUUUU | | CCTCTTTT | junction |
| 358 | AAAAGAGGUAGGG | 598 | GAUCUGUCGCCCU | 838 | GATCTGTCGCCCT | Exon 45/intron 45 |
| | CGACAGAUC | | ACCUCUUUU | | ACCTCTTTT | junction |
| 359 | AAAAGAGGUAGGG | 599 | AGAUCUGUCGCCC | 839 | AGATCTGTCGCCC | Exon 45/intron 45 |
| | CGACAGAUCU | | UACCUCUUUU | | TACCTCTTTT | junction |
| 360 | AAAGAGGUAGGGC | 600 | AUCUGUCGCCCUA | 840 | ATCTGTCGCCCTA | Exon 45/intron 45 |
| | GACAGAU | | CCUCUUU | | CCTCTTT | junction |
| 361 | AAAGAGGUAGGGC | 601 | GAUCUGUCGCCCU | 841 | GATCTGTCGCCCT | Exon 45/intron 45 |
| | GACAGAUC | | ACCUCUUU | | ACCTCTTT | junction |
| 362 | AAAGAGGUAGGGC | 602 | AGAUCUGUCGCCC | 842 | AGATCTGTCGCCC | Exon 45/intron 45 |
| | GACAGAUCU | | UACCUCUUU | | TACCTCTTT | junction |
| 363 | AAGAGGUAGGGCG | 603 | GAUCUGUCGCCCU | 843 | GATCTGTCGCCCT | Exon 45/intron 45 |
| | ACAGAUC | | ACCUCUU | | ACCTCTT | junction |
| 364 | AAGAGGUAGGGCG | 604 | AGAUCUGUCGCCC | 844 | AGATCTGTCGCCC | Exon 45/intron 45 |
| | ACAGAUCU | | UACCUCUU | | TACCTCTT | junction |
| 365 | AGAGGUAGGGCGA | 605 | AGAUCUGUCGCCC | 845 | AGATCTGTCGCCC | Exon 45/intron 45 |
| | CAGAUCU | | UACCUCU | | TACCTCT | junction |
| 366 | AGAGGUAGGGCGA | 606 | CUAUUAGAUCUGU | 846 | CTATTAGATCTGT | Exon 45/intron 45 |
| | CAGAUCUAAUAG | | CGCCCUACCUCU | | CGCCCTACCTCT | junction |
| 367 | GAGGUAGGGCGAC | 607 | CUAUUAGAUCUGU | 847 | CTATTAGATCTGT | Exon 45/intron 45 |
| | AGAUCUAAUAG | | CGCCCUACCUC | | CGCCCTACCTC | junction |
| 368 | GAGGUAGGGCGAC | 608 | CCUAUUAGAUCUG | 848 | CCTATTAGATCTG | Exon 45/intron 45 |
| | AGAUCUAAUAGG | | UCGCCCUACCUC | | TCGCCCTACCTC | junction |
| 369 | AGGUAGGGCGACA | 609 | CUAUUAGAUCUGU | 849 | CTATTAGATCTGT | Exon 45/intron 45 |
| | GAUCUAAUAG | | CGCCCUACCU | | CGCCCTACCT | junction |
| 370 | AGGUAGGGCGACA | 610 | CCUAUUAGAUCUG | 850 | CCTATTAGATCTG | Exon 45/intron 45 |
| | GAUCUAAUAGG | | UCGCCCUACCU | | TCGCCCTACCT | junction |
| 371 | AGGUAGGGCGACA | 611 | UCCUAUUAGAUCU | 851 | TCCTATTAGATCT | Exon 45/intron 45 |
| | GAUCUAAUAGGA | | GUCGCCCUACCU | | GTCGCCCTACCT | junction |
| 372 | GGUAGGGCGACAG | 612 | CUAUUAGAUCUGU | 852 | CTATTAGATCTGT | Exon 45/intron 45 |
| | AUCUAAUAG | | CGCCCUACC | | CGCCCTACC | junction |
| 373 | GGUAGGGCGACAG | 613 | CCUAUUAGAUCUG | 853 | CCTATTAGATCTG | Exon 45/intron 45 |
| | AUCUAAUAGG | | UCGCCCUACC | | TCGCCCTACC | junction |
| 374 | GGUAGGGCGACAG | 614 | UCCUAUUAGAUCU | 854 | TCCTATTAGATCT | Exon 45/intron 45 |
| | AUCUAAUAGGA | | GUCGCCCUACC | | GTCGCCCTACC | junction |
| 375 | GGUAGGGCGACAG | 615 | UUCCUAUUAGAUC | 855 | TTCCTATTAGATC | Exon 45/intron 45 |
| | AUCUAAUAGGAA | | UGUCGCCCUACC | | TGTCGCCCTACC | junction |
| 376 | GUAGGGCGACAGA | 616 | CUAUUAGAUCUGU | 856 | CTATTAGATCTGT | Intron 45 |
| | UCUAAUAG | | CGCCCUAC | | CGCCCTAC | |
| 377 | GUAGGGCGACAGA | 617 | CCUAUUAGAUCUG | 857 | CCTATTAGATCTG | Intron 45 |
| | UCUAAUAGG | | UCGCCCUAC | | TCGCCCTAC | |
| 378 | GUAGGGCGACAGA | 618 | UCCUAUUAGAUCU | 858 | TCCTATTAGATCT | Intron 45 |
| | UCUAAUAGGA | | GUCGCCCUAC | | GTCGCCCTAC | |
| 379 | GUAGGGCGACAGA | 619 | UUCCUAUUAGAUC | 859 | TTCCTATTAGATC | Intron 45 |
| | UCUAAUAGGAA | | UGUCGCCCUAC | | TGTCGCCCTAC | |
| 380 | GUAGGGCGACAGA | 620 | AUUCCUAUUAGAU | 860 | ATTCCTATTAGAT | Intron 45 |
| | UCUAAUAGGAAU | | CUGUCGCCCUAC | | CTGTCGCCCTAC | |
| 381 | UAGGGCGACAGAU | 621 | UCCUAUUAGAUCU | 861 | TCCTATTAGATCT | Intron 45 |
| | CUAAUAGGA | | GUCGCCCUA | | GTCGCCCTA | |
| 382 | UAGGGCGACAGAU | 622 | UUCCUAUUAGAUC | 862 | TTCCTATTAGATC | Intron 45 |
| | CUAAUAGGAA | | UGUCGCCCUA | | TGTCGCCCTA | |
| 383 | UAGGGCGACAGAU | 623 | AUUCCUAUUAGAU | 863 | ATTCCTATTAGAT | Intron 45 |
| | CUAAUAGGAAU | | CUGUCGCCCUA | | CTGTCGCCCTA | |
| 384 | AGGGCGACAGAUC | 624 | UCCUAUUAGAUCU | 864 | TCCTATTAGATCT | Intron 45 |
| | UAAUAGGA | | GUCGCCCU | | GTCGCCCT | |
| 385 | AGGGCGACAGAUC | 625 | UUCCUAUUAGAUC | 865 | TTCCTATTAGATC | Intron 45 |
| | UAAUAGGAA | | UGUCGCCCU | | TGTCGCCCT | |
| 386 | AGGGCGACAGAUC | 626 | AUUCCUAUUAGAU | 866 | ATTCCTATTAGAT | Intron 45 |
| | UAAUAGGAAU | | CUGUCGCCCU | | CTGTCGCCCT | |
| 387 | GGGCGACAGAUCU | 627 | UCCUAUUAGAUCU | 867 | TCCTATTAGATCT | Intron 45 |
| | AAUAGGA | | GUCGCCC | | GTCGCCC | |
| 388 | GGGCGACAGAUCU | 628 | UUCCUAUUAGAUC | 868 | TTCCTATTAGATC | Intron 45 |
| | AAUAGGAA | | UGUCGCCC | | TGTCGCCC | |
| 389 | GGGCGACAGAUCU | 629 | AUUCCUAUUAGAU | 869 | ATTCCTATTAGAT | Intron 45 |
| | AAUAGGAAU | | CUGUCGCCC | | CTGTCGCCC | |
| 390 | AGAUUAUAAGCAG | 630 | CUUUCACCCUGCU | 870 | CTTTCACCCTGCT | Intron 45 |
| | GGUGAAAG | | UAUAAUCU | | TATAATCT | |
| 391 | AGAUUAUAAGCAG | 631 | CCUUUCACCCUGC | 871 | CCTTTCACCCTGC | Intron 45 |
| | GGUGAAAGG | | UUAUAAUCU | | TTATAATCT | |
| 392 | AGAUUAUAAGCAG | 632 | GCCUUUCACCCUG | 872 | GCCTTTCACCCTG | Intron 45 |
| | GGUGAAAGGC | | CUUAUAAUCU | | CTTATAATCT | |
| 393 | AGAUUAUAAGCAG | 633 | UGCCUUUCACCCU | 873 | TGCCTTTCACCCT | Intron 45 |
| | GGUGAAAGGCA | | GCUUAUAAUCU | | GCTTATAATCT | |
| 394 | AGAUUAUAAGCAG | 634 | GUGCCUUUCACCC | 874 | GTGCCTTTCACCC | Intron 45 |
| | GGUGAAAGGCAC | | UGCUUAUAAUCU | | TGCTTATAATCT | |
| 395 | GAUUAUAAGCAGG | 635 | CUUUCACCCUGCU | 875 | CTTTCACCCTGCT | Intron 45 |
| | GUGAAAG | | UAUAAUC | | TATAATC | |
| 396 | GAUUAUAAGCAGG | 636 | CCUUUCACCCUGC | 876 | CCTTTCACCCTGC | Intron 45 |
| | GUGAAAGG | | UUAUAAUC | | TTATAATC | |
| 397 | GAUUAUAAGCAGG | 637 | GCCUUUCACCCUG | 877 | GCCTTTCACCCTG | Intron 45 |
| | GUGAAAGGC | | CUUAUAAUC | | CTTATAATC | |
| 398 | GAUUAUAAGCAGG | 638 | UGCCUUUCACCCU | 878 | TGCCTTTCACCCT | Intron 45 |
| | GUGAAAGGCA | | GCUUAUAAUC | | GCTTATAATC | |
| 399 | GAUUAUAAGCAGG | 639 | GUGCCUUUCACCC | 879 | GTGCCTTTCACCC | Intron 45 |
| | GUGAAAGGCAC | | UGCUUAUAAUC | | TGCTTATAATC | |

†Each thymine base (T) in any one of the oligonucleotides and/or target sequences provided in Table 8 may independently and optionally be replaced with a uracil base (U), and/or each U may independently and optionally be replaced with a T. Target sequences listed in Table 8 contain U′s, but binding of a DMD-targeting oligonucleotide to RNA and/or DNA is contemplated.

[0248] In some embodiments, an oligonucleotide useful for targeting DMD (e.g., for exon skipping) targets a region of a DMD sequence. In some embodiments, an oligonucleotide useful for targeting DMD (e.g., for exon skipping) targets a region of a DMD RNA (e.g., the Dp427m transcript of SEQ ID NO: 130). In some embodiments, an oligonucleotide useful for targeting DMD (e.g., for exon skipping) comprises a region of complementarity to a DMD RNA (e.g., the Dp427m transcript of SEQ ID NO: 130). In some embodiments, an oligonucleotide useful for targeting DMD (e.g., for exon skipping) comprises a region of complementarity to an exon of a DMD RNA (e.g., SEQ ID NO: 131, 954, or 972). In some embodiments, an oligonucleotide useful for targeting DMD (e.g., for exon skipping) comprises a region of complementarity to an intron of a DMD RNA (e.g., SEQ ID NO: 958 or 967). In some embodiments, an oligonucleotide useful for targeting DMD (e.g., for exon skipping) comprises a region of complementarity to a portion of a DMD sequence (e.g., a sequence provided by any one of SEQ ID NOs: 955-957, 959-966, 968-971, and 973). Examples of DMD sequences are provided below. Each of the DMD sequences provided below include thymine nucleotides (T's), but it should be understood that each sequence can represent a DNA sequence or an RNA sequence in which any or all of the T's would be replaced with uracil nucleotides (U's).

Homo sapiens dystrophin (DMD), transcript variant Dp427m, mRNA (NCBI
Reference Sequence: NM_004006.2)
TCCTGGCATCAGTTACTGTGTTGACTCACTCAGTGTTGGGATCACTCACTTTCCCCCTACAGGACTCAGATCTGGGA
GGCAATTACCTTCGGAGAAAAACGAATAGGAAAAACTGAAGTGTTACTTTTTTTAAAGCTGCTGAAGTTTGTTGGTT
TCTCATTGTTTTTAAGCCTACTGGAGCAATAAAGTTTGAAGAACTTTTACCAGGTTTTTTTTATCGCTGCCTTGATA
TACACTTTTCAAAATGCTTTGGTGGGAAGAAGTAGAGGACTGTTATGAAAGAGAAGATGTTCAAAAGAAAACATTCA
CAAAATGGGTAAATGCACAATTTTCTAAGTTTGGGAAGCAGCATATTGAGAACCTCTTCAGTGACCTACAGGATGGG
AGGCGCCTCCTAGACCTCCTCGAAGGCCTGACAGGGCAAAAACTGCCAAAAGAAAAAGGATCCACAAGAGTTCATGC
CCTGAACAATGTCAACAAGGCACTGCGGGTTTTGCAGAACAATAATGTTGATTTAGTGAATATTGGAAGTACTGACA
TCGTAGATGGAAATCATAAACTGACTCTTGGTTTGATTTGGAATATAATCCTCCACTGGCAGGTCAAAAATGTAATG
AAAAATATCATGGCTGGATTGCAACAAACCAACAGTGAAAAGATTCTCCTGAGCTGGGTCCGACAATCAACTCGTAA
TTATCCACAGGTTAATGTAATCAACTTCACCACCAGCTGGTCTGATGGCCTGGCTTTGAATGCTCTCATCCATAGTC
ATAGGCCAGACCTATTTGACTGGAATAGTGTGGTTTGCCAGCAGTCAGCCACACAACGACTGGAACATGCATTCAAC
ATCGCCAGATATCAATTAGGCATAGAGAAACTACTCGATCCTGAAGATGTTGATACCACCTATCCAGATAAGAAGTC
CATCTTAATGTACATCACATCACTCTTCCAAGTTTTGCCTCAACAAGTGAGCATTGAAGCCATCCAGGAAGTGGAAA
TGTTGCCAAGGCCACCTAAAGTGACTAAAGAAGAACATTTTCAGTTACATCATCAAATGCACTATTCTCAACAGATC
ACGGTCAGTCTAGCACAGGGATATGAGAGAACTTCTTCCCCTAAGCCTCGATTCAAGAGCTATGCCTACACACAGGC
TGCTTATGTCACCACCTCTGACCCTACACGGAGCCCATTTCCTTCACAGCATTTGGAAGCTCCTGAAGACAAGTCAT
TTGGCAGTTCATTGATGGAGAGTGAAGTAAACCTGGACCGTTATCAAACAGCTTTAGAAGAAGTATTATCGTGGCTT
CTTTCTGCTGAGGACACATTGCAAGCACAAGGAGAGATTTCTAATGATGTGGAAGTGGTGAAAGACCAGTTTCATAC
TCATGAGGGGTACATGATGGATTTGACAGCCCATCAGGGCCGGGTTGGTAATATTCTACAATTGGGAAGTAAGCTGA
TTGGAACAGGAAAATTATCAGAAGATGAAGAAACTGAAGTACAAGAGCAGATGAATCTCCTAAATTCAAGATGGGAA
TGCCTCAGGGTAGCTAGCATGGAAAAACAAAGCAATTTACATAGAGTTTTAATGGATCTCCAGAATCAGAAACTGAA
AGAGTTGAATGACTGGCTAACAAAAACAGAAGAAAGAACAAGGAAAATGGAGGAAGAGCCTCTTGGACCTGATCTTG
AAGACCTAAAACGCCAAGTACAACAACATAAGGTGCTTCAAGAAGATCTAGAACAAGAACAAGTCAGGGTCAATTCT
CTCACTCACATGGTGGTGGTAGTTGATGAATCTAGTGGAGATCACGCAACTGCTGCTTTGGAAGAACAACTTAAGGT
ATTGGGAGATCGATGGGCAAACATCTGTAGATGGACAGAAGACCGCTGGGTTCTTTTACAAGACATCCTTCTCAAAT
GGCAACGTCTTACTGAAGAACAGTGCCTTTTTAGTGCATGGCTTTCAGAAAAAGAAGATGCAGTGAACAAGATTCAC
ACAACTGGCTTTAAAGATCAAAATGAAATGTTATCAAGTCTTCAAAAACTGGCCGTTTTAAAAGCGGATCTAGAAAA
GAAAAAGCAATCCATGGGCAAACTGTATTCACTCAAACAAGATCTTCTTTCAACACTGAAGAATAAGTCAGTGACCC
AGAAGACGGAAGCATGGCTGGATAACTTTGCCCGGTGTTGGGATAATTTAGTCCAAAAACTTGAAAAGAGTACAGCA
CAGATTTCACAGGCTGTCACCACCACTCAGCCATCACTAACACAGACAACTGTAATGGAAACAGTAACTACGGTGAC
CACAAGGGAACAGATCCTGGTAAAGCATGCTCAAGAGGAACTTCCACCACCACCTCCCCAAAAGAAGAGGCAGATTA
CTGTGGATTCTGAAATTAGGAAAAGGTTGGATGTTGATATAACTGAACTTCACAGCTGGATTACTCGCTCAGAAGCT
GTGTTGCAGAGTCCTGAATTTGCAATCTTTCGGAAGGAAGGCAACTTCTCAGACTTAAAAGAAAAAGTCAATGCCAT
AGAGCGAGAAAAAGCTGAGAAGTTCAGAAAACTGCAAGATGCCAGCAGATCAGCTCAGGCCCTGGTGGAACAGATGG
TGAATGAGGGTGTTAATGCAGATAGCATCAAACAAGCCTCAGAACAACTGAACAGCCGGTGGATCGAATTCTGCCAG
TTGCTAAGTGAGAGACTTAACTGGCTGGAGTATCAGAACAACATCATCGCTTTCTATAATCAGCTACAACAATTGGA
GCAGATGACAACTACTGCTGAAAACTGGTTGAAAATCCAACCCACCACCCCATCAGAGCCAACAGCAATTAAAAGTC
AGTTAAAAATTTGTAAGGATGAAGTCAACCGGCTATCAGGTCTTCAACCTCAAATTGAACGATTAAAAATTCAAAGC
ATAGCCCTGAAAGAGAAAGGACAAGGACCCATGTTCCTGGATGCAGACTTTGTGGCCTTTACAAATCATTTTAAGCA
AGTCTTTTCTGATGTGCAGGCCAGAGAGAAAGAGCTACAGACAATTTTTGACACTTTGCCACCAATGCGCTATCAGG
AGACCATGAGTGCCATCAGGACATGGGTCCAGCAGTCAGAAACCAAACTCTCCATACCTCAACTTAGTGTCACCGAC
TATGAAATCATGGAGCAGAGACTCGGGGAATTGCAGGCTTTACAAAGTTCTCTGCAAGAGCAACAAAGTGGCCTATA
CTATCTCAGCACCACTGTGAAAGAGATGTCGAAGAAAGCGCCCTCTGAAATTAGCCGGAAATATCAATCAGAATTTG
AAGAAATTGAGGGACGCTGGAAGAAGCTCTCCTCCCAGCTGGTTGAGCATTGTCAAAAGCTAGAGGAGCAAATGAAT
AAACTCCGAAAAATTCAGAATCACATACAAACCCTGAAGAAATGGATGGCTGAAGTTGATGTTTTTCTGAAGGAGGA
ATGGCCTGCCCTTGGGGATTCAGAAATTCTAAAAAAGCAGCTGAAACAGTGCAGACTTTTAGTCAGTGATATTCAGA
CAATTCAGCCCAGTCTAAACAGTGTCAATGAAGGTGGGCAGAAGATAAAGAATGAAGCAGAGCCAGAGTTTGCTTCG
AGACTTGAGACAGAACTCAAAGAACTTAACACTCAGTGGGATCACATGTGCCAACAGGTCTATGCCAGAAAGGAGGC
CTTGAAGGGAGGTTTGGAGAAAACTGTAAGCCTCCAGAAAGATCTATCAGAGATGCACGAATGGATGACACAAGCTG
AAGAAGAGTATCTTGAGAGAGATTTTGAATATAAAACTCCAGATGAATTACAGAAAGCAGTTGAAGAGATGAAGAGA
GCTAAAGAAGAGGCCCAACAAAAAGAAGCGAAAGTGAAACTCCTTACTGAGTCTGTAAATAGTGTCATAGCTCAAGC
TCCACCTGTAGCACAAGAGGCCTTAAAAAAGGAACTTGAAACTCTAACCACCAACTACCAGTGGCTCTGCACTAGGC
TGAATGGGAAATGCAAGACTTTGGAAGAAGTTTGGGCATGTTGGCATGAGTTATTGTCATACTTGGAGAAAGCAAAC
AAGTGGCTAAATGAAGTAGAATTTAAACTTAAAACCACTGAAAACATTCCTGGCGGAGCTGAGGAAATCTCTGAGGT
GCTAGATTCACTTGAAAATTTGATGCGACATTCAGAGGATAACCCAAATCAGATTCGCATATTGGCACAGACCCTAA
CAGATGGCGGAGTCATGGATGAGCTAATCAATGAGGAACTTGAGACATTTAATTCTCGTTGGAGGGAACTACATGAA
GAGGCTGTAAGGAGGCAAAAGTTGCTTGAACAGAGCATCCAGTCTGCCCAGGAGACTGAAAAATCCTTACACTTAAT
CCAGGAGTCCCTCACATTCATTGACAAGCAGTTGGCAGCTTATATTGCAGACAAGGTGGACGCAGCTCAAATGCCTC
AGGAAGCCCAGAAAATCCAATCTGATTTGACAAGTCATGAGATCAGTTTAGAAGAAATGAAGAAACATAATCAGGGG
AAGGAGGCTGCCCAAAGAGTCCTGTCTCAGATTGATGTTGCACAGAAAAAATTACAAGATGTCTCCATGAAGTTTCG
ATTATTCCAGAAACCAGCCAATTTTGAGCAGCGTCTACAAGAAAGTAAGATGATTTTAGATGAAGTGAAGATGCACT
TGCCTGCATTGGAAACAAAGAGTGTGGAACAGGAAGTAGTACAGTCACAGCTAAATCATTGTGTGAACTTGTATAAA
AGTCTGAGTGAAGTGAAGTCTGAAGTGGAAATGGTGATAAAGACTGGACGTCAGATTGTACAGAAAAAGCAGACGGA
AAATCCCAAAGAACTTGATGAAAGAGTAACAGCTTTGAAATTGCATTATAATGAGCTGGGAGCAAAGGTAACAGAAA
GAAAGCAACAGTTGGAGAAATGCTTGAAATTGTCCCGTAAGATGCGAAAGGAAATGAATGTCTTGACAGAATGGCTG
GCAGCTACAGATATGGAATTGACAAAGAGATCAGCAGTTGAAGGAATGCCTAGTAATTTGGATTCTGAAGTTGCCTG
GGGAAAGGCTACTCAAAAAGAGATTGAGAAACAGAAGGTGCACCTGAAGAGTATCACAGAGGTAGGAGAGGCCTTGA
AAACAGTTTTGGGCAAGAAGGAGACGTTGGTGGAAGATAAACTCAGTCTTCTGAATAGTAACTGGATAGCTGTCACC
TCCCGAGCAGAAGAGTGGTTAAATCTTTTGTTGGAATACCAGAAACACATGGAAACTTTTGACCAGAATGTGGACCA
CATCACAAAGTGGATCATTCAGGCTGACACACTTTTGGATGAATCAGAGAAAAAGAAACCCCAGCAAAAAGAAGACG
TGCTTAAGCGTTTAAAGGCAGAACTGAATGACATACGCCCAAAGGTGGACTCTACACGTGACCAAGCAGCAAACTTG
ATGGCAAACCGCGGTGACCACTGCAGGAAATTAGTAGAGCCCCAAATCTCAGAGCTCAACCATCGATTTGCAGCCAT
TTCACACAGAATTAAGACTGGAAAGGCCTCCATTCCTTTGAAGGAATTGGAGCAGTTTAACTCAGATATACAAAAAT
TGCTTGAACCACTGGAGGCTGAAATTCAGCAGGGGGTGAATCTGAAAGAGGAAGACTTCAATAAAGATATGAATGAA
GACAATGAGGGTACTGTAAAAGAATTGTTGCAAAGAGGAGACAACTTACAACAAAGAATCACAGATGAGAGAAAGCG
AGAGGAAATAAAGATAAAACAGCAGCTGTTACAGACAAAACATAATGCTCTCAAGGATTTGAGGTCTCAAAGAAGAA
AAAAGGCTCTAGAAATTTCTCATCAGTGGTATCAGTACAAGAGGCAGGCTGATGATCTCCTGAAATGCTTGGATGAC
ATTGAAAAAAAATTAGCCAGCCTACCTGAGCCCAGAGATGAAAGGAAAATAAAGGAAATTGATCGGGAATTGCAGAA
GAAGAAAGAGGAGCTGAATGCAGTGCGTAGGCAAGCTGAGGGCTTGTCTGAGGATGGGGCCGCAATGGCAGTGGAGC
CAACTCAGATCCAGCTCAGCAAGCGCTGGCGGGAAATTGAGAGCAAATTTGCTCAGTTTCGAAGACTCAACTTTGCA
CAAATTCACACTGTCCGTGAAGAAACGATGATGGTGATGACTGAAGACATGCCTTTGGAAATTTCTTATGTGCCTTC
TACTTATTTGACTGAAATCACTCATGTCTCACAAGCCCTATTAGAAGTGGAACAACTTCTCAATGCTCCTGACCTCT
GTGCTAAGGACTTTGAAGATCTCTTTAAGCAAGAGGAGTCTCTGAAGAATATAAAAGATAGTCTACAACAAAGCTCA
GGTCGGATTGACATTATTCATAGCAAGAAGACAGCAGCATTGCAAAGTGCAACGCCTGTGGAAAGGGTGAAGCTACA
GGAAGCTCTCTCCCAGCTTGATTTCCAATGGGAAAAAGTTAACAAAATGTACAAGGACCGACAAGGGCGATTTGACA
GATCTGTTGAGAAATGGCGGCGTTTTCATTATGATATAAAGATATTTAATCAGTGGCTAACAGAAGCTGAACAGTTT
CTCAGAAAGACACAAATTCCTGAGAATTGGGAACATGCTAAATACAAATGGTATCTTAAGGAACTCCAGGATGGCAT
TGGGCAGCGGCAAACTGTTGTCAGAACATTGAATGCAACTGGGGAAGAAATAATTCAGCAATCCTCAAAAACAGATG
CCAGTATTCTACAGGAAAAATTGGGAAGCCTGAATCTGCGGTGGCAGGAGGTCTGCAAACAGCTGTCAGACAGAAAA
AAGAGGCTAGAAGAACAAAAGAATATCTTGTCAGAATTTCAAAGAGATTTAAATGAATTTGTTTTATGGTTGGAGGA
AGCAGATAACATTGCTAGTATCCCACTTGAACCTGGAAAAGAGCAGCAACTAAAAGAAAAGCTTGAGCAAGTCAAGT
TACTGGTGGAAGAGTTGCCCCTGCGCCAGGGAATTCTCAAACAATTAAATGAAACTGGAGGACCCGTGCTTGTAAGT
GCTCCCATAAGCCCAGAAGAGCAAGATAAACTTGAAAATAAGCTCAAGCAGACAAATCTCCAGTGGATAAAGGTTTC
CAGAGCTTTACCTGAGAAACAAGGAGAAATTGAAGCTCAAATAAAAGACCTTGGGCAGCTTGAAAAAAAGCTTGAAG
ACCTTGAAGAGCAGTTAAATCATCTGCTGCTGTGGTTATCTCCTATTAGGAATCAGTTGGAAATTTATAACCAACCA
AACCAAGAAGGACCATTTGACGTTCAGGAAACTGAAATAGCAGTTCAAGCTAAACAACCGGATGTGGAAGAGATTTT
GTCTAAAGGGCAGCATTTGTACAAGGAAAAACCAGCCACTCAGCCAGTGAAGAGGAAGTTAGAAGATCTGAGCTCTG
AGTGGAAGGCGGTAAACCGTTTACTTCAAGAGCTGAGGGCAAAGCAGCCTGACCTAGCTCCTGGACTGACCACTATT
GGAGCCTCTCCTACTCAGACTGTTACTCTGGTGACACAACCTGTGGTTACTAAGGAAACTGCCATCTCCAAACTAGA
AATGCCATCTTCCTTGATGTTGGAGGTACCTGCTCTGGCAGATTTCAACCGGGCTTGGACAGAACTTACCGACTGGC
TTTCTCTGCTTGATCAAGTTATAAAATCACAGAGGGTGATGGTGGGTGACCTTGAGGATATCAACGAGATGATCATC
AAGCAGAAGGCAACAATGCAGGATTTGGAACAGAGGCGTCCCCAGTTGGAAGAACTCATTACCGCTGCCCAAAATTT
GAAAAACAAGACCAGCAATCAAGAGGCTAGAACAATCATTACGGATCGAATTGAAAGAATTCAGAATCAGTGGGATG
AAGTACAAGAACACCTTCAGAACCGGAGGCAACAGTTGAATGAAATGTTAAAGGATTCAACACAATGGCTGGAAGCT
AAGGAAGAAGCTGAGCAGGTCTTAGGACAGGCCAGAGCCAAGCTTGAGTCATGGAAGGAGGGTCCCTATACAGTAGA
TGCAATCCAAAAGAAAATCACAGAAACCAAGCAGTTGGCCAAAGACCTCCGCCAGTGGCAGACAAATGTAGATGTGG
CAAATGACTTGGCCCTGAAACTTCTCCGGGATTATTCTGCAGATGATACCAGAAAAGTCCACATGATAACAGAGAAT
ATCAATGCCTCTTGGAGAAGCATTCATAAAAGGGTGAGTGAGCGAGAGGCTGCTTTGGAAGAAACTCATAGATTACT
GCAACAGTTCCCCCTGGACCTGGAAAAGTTTCTTGCCTGGCTTACAGAAGCTGAAACAACTGCCAATGTCCTACAGG
ATGCTACCCGTAAGGAAAGGCTCCTAGAAGACTCCAAGGGAGTAAAAGAGCTGATGAAACAATGGCAAGACCTCCAA
GGTGAAATTGAAGCTCACACAGATGTTTATCACAACCTGGATGAAAACAGCCAAAAAATCCTGAGATCCCTGGAAGG
TTCCGATGATGCAGTCCTGTTACAAAGACGTTTGGATAACATGAACTTCAAGTGGAGTGAACTTCGGAAAAAGTCTC
TCAACATTAGGTCCCATTTGGAAGCCAGTTCTGACCAGTGGAAGCGTCTGCACCTTTCTCTGCAGGAACTTCTGGTG
TGGCTACAGCTGAAAGATGATGAATTAAGCCGGCAGGCACCTATTGGAGGCGACTTTCCAGCAGTTCAGAAGCAGAA
CGATGTACATAGGGCCTTCAAGAGGGAATTGAAAACTAAAGAACCTGTAATCATGAGTACTCTTGAGACTGTACGAA
TATTTCTGACAGAGCAGCCTTTGGAAGGACTAGAGAAACTCTACCAGGAGCCCAGAGAGCTGCCTCCTGAGGAGAGA
GCCCAGAATGTCACTCGGCTTCTACGAAAGCAGGCTGAGGAGGTCAATACTGAGTGGGAAAAATTGAACCTGCACTC
CGCTGACTGGCAGAGAAAAATAGATGAGACCCTTGAAAGACTCCAGGAACTTCAAGAGGCCACGGATGAGCTGGACC
TCAAGCTGCGCCAAGCTGAGGTGATCAAGGGATCCTGGCAGCCCGTGGGCGATCTCCTCATTGACTCTCTCCAAGAT
CACCTCGAGAAAGTCAAGGCACTTCGAGGAGAAATTGCGCCTCTGAAAGAGAACGTGAGCCACGTCAATGACCTTGC
TCGCCAGCTTACCACTTTGGGCATTCAGCTCTCACCGTATAACCTCAGCACTCTGGAAGACCTGAACACCAGATGGA
AGCTTCTGCAGGTGGCCGTCGAGGACCGAGTCAGGCAGCTGCATGAAGCCCACAGGGACTTTGGTCCAGCATCTCAG
CACTTTCTTTCCACGTCTGTCCAGGGTCCCTGGGAGAGAGCCATCTCGCCAAACAAAGTGCCCTACTATATCAACCA
CGAGACTCAAACAACTTGCTGGGACCATCCCAAAATGACAGAGCTCTACCAGTCTTTAGCTGACCTGAATAATGTCA
GATTCTCAGCTTATAGGACTGCCATGAAACTCCGAAGACTGCAGAAGGCCCTTTGCTTGGATCTCTTGAGCCTGTCA
GCTGCATGTGATGCCTTGGACCAGCACAACCTCAAGCAAAATGACCAGCCCATGGATATCCTGCAGATTATTAATTG
TTTGACCACTATTTATGACCGCCTGGAGCAAGAGCACAACAATTTGGTCAACGTCCCTCTCTGCGTGGATATGTGTC
TGAACTGGCTGCTGAATGTTTATGATACGGGACGAACAGGGAGGATCCGTGTCCTGTCTTTTAAAACTGGCATCATT
TCCCTGTGTAAAGCACATTTGGAAGACAAGTACAGATACCTTTTCAAGCAAGTGGCAAGTTCAACAGGATTTTGTGA
CCAGCGCAGGCTGGGCCTCCTTCTGCATGATTCTATCCAAATTCCAAGACAGTTGGGTGAAGTTGCATCCTTTGGGG
GCAGTAACATTGAGCCAAGTGTCCGGAGCTGCTTCCAATTTGCTAATAATAAGCCAGAGATCGAAGCGGCCCTCTTC
CTAGACTGGATGAGACTGGAACCCCAGTCCATGGTGTGGCTGCCCGTCCTGCACAGAGTGGCTGCTGCAGAAACTGC
CAAGCATCAGGCCAAATGTAACATCTGCAAAGAGTGTCCAATCATTGGATTCAGGTACAGGAGTCTAAAGCACTTTA
ATTATGACATCTGCCAAAGCTGCTTTTTTTCTGGTCGAGTTGCAAAAGGCCATAAAATGCACTATCCCATGGTGGAA
TATTGCACTCCGACTACATCAGGAGAAGATGTTCGAGACTTTGCCAAGGTACTAAAAAACAAATTTCGAACCAAAAG
GTATTTTGCGAAGCATCCCCGAATGGGCTACCTGCCAGTGCAGACTGTCTTAGAGGGGGACAACATGGAAACTCCCG
TTACTCTGATCAACTTCTGGCCAGTAGATTCTGCGCCTGCCTCGTCCCCTCAGCTTTCACACGATGATACTCATTCA
CGCATTGAACATTATGCTAGCAGGCTAGCAGAAATGGAAAACAGCAATGGATCTTATCTAAATGATAGCATCTCTCC
TAATGAGAGCATAGATGATGAACATTTGTTAATCCAGCATTACTGCCAAAGTTTGAACCAGGACTCCCCCCTGAGCC
AGCCTCGTAGTCCTGCCCAGATCTTGATTTCCTTAGAGAGTGAGGAAAGAGGGGAGCTAGAGAGAATCCTAGCAGAT
CTTGAGGAAGAAAACAGGAATCTGCAAGCAGAATATGACCGTCTAAAGCAGCAGCACGAACATAAAGGCCTGTCCCC
ACTGCCGTCCCCTCCTGAAATGATGCCCACCTCTCCCCAGAGTCCCCGGGATGCTGAGCTCATTGCTGAGGCCAAGC
TACTGCGTCAACACAAAGGCCGCCTGGAAGCCAGGATGCAAATCCTGGAAGACCACAATAAACAGCTGGAGTCACAG
TTACACAGGCTAAGGCAGCTGCTGGAGCAACCCCAGGCAGAGGCCAAAGTGAATGGCACAACGGTGTCCTCTCCTTC
TACCTCTCTACAGAGGTCCGACAGCAGTCAGCCTATGCTGCTCCGAGTGGTTGGCAGTCAAACTTCGGACTCCATGG
GTGAGGAAGATCTTCTCAGTCCTCCCCAGGACACAAGCACAGGGTTAGAGGAGGTGATGGAGCAACTCAACAACTCC
TTCCCTAGTTCAAGAGGAAGAAATACCCCTGGAAAGCCAATGAGAGAGGACACAATGTAGGAAGTCTTTTCCACATG
GCAGATGATTTGGGCAGAGCGATGGAGTCCTTAGTATCAGTCATGACAGATGAAGAAGGAGCAGAATAAATGTTTTA
CAACTCCTGATTCCCGCATGGTTTTTATAATATTCATACAACAAAGAGGATTAGACAGTAAGAGTTTACAAGAAATA
AATCTATATTTTTGTGAAGGGTAGTGGTATTATACTGTAGATTTCAGTAGTTTCTAAGTCTGTTATTGTTTTGTTAA
CAATGGCAGGTTTTACACGTCTATGCAATTGTACAAAAAAGTTATAAGAAAACTACATGTAAAATCTTGATAGCTAA
ATAACTTGCCATTTCTTTATATGGAACGCATTTTGGGTTGTTTAAAAATTTATAACAGTTATAAAGAAAGATTGTAA
ACTAAAGTGTGCTTTATAAAAAAAAGTTGTTTATAAAAACCCCTAAAAACAAAACAAACACACACACACACACATAC
ACACACACACACAAAACTTTGAGGCAGCGCATTGTTTTGCATCCTTTTGGCGTGATATCCATATGAAATTCATGGCT
TTTTCTTTTTTTGCATATTAAAGATAAGACTTCCTCTACCACCACACCAAATGACTACTACACACTGCTCATTTGAG
AACTGTCAGCTGAGTGGGGCAGGCTTGAGTTTTCATTTCATATATCTATATGTCTATAAGTATATAAATACTATAGT
TATATAGATAAAGAGATACGAATTTCTATAGACTGACTTTTTCCATTTTTTAAATGTTCATGTCACATCCTAATAGA
AAGAAATTACTTCTAGTCAGTCATCCAGGCTTACCTGCTTGGTCTAGAATGGATTTTTCCCGGAGCCGGAAGCCAGG
AGGAAACTACACCACACTAAAACATTGTCTACAGCTCCAGATGTTTCTCATTTTAAACAACTTTCCACTGACAACGA
AAGTAAAGTAAAGTATTGGATTTTTTTAAAGGGAACATGTGAATGAATACACAGGACTTATTATATCAGAGTGAGTA
ATCGGTTGGTTGGTTGATTGATTGATTGATTGATACATTCAGCTTCCTGCTGCTAGCAATGCCACGATTTAGATTTA
ATGATGCTTCAGTGGAAATCAATCAGAAGGTATTCTGACCTTGTGAACATCAGAAGGTATTTTTTAACTCCCAAGCA
GTAGCAGGACGATGATAGGGCTGGAGGGCTATGGATTCCCAGCCCATCCCTGTGAAGGAGTAGGCCACTCTTTAAGT
GAAGGATTGGATGATTGTTCATAATACATAAAGTTCTCTGTAATTACAACTAAATTATTATGCCCTCTTCTCACAGT
CAAAAGGAACTGGGTGGTTTGGTTTTTGTTGCTTTTTTAGATTTATTGTCCCATGTGGGATGAGTTTTTAAATGCCA
CAAGACATAATTTAAAATAAATAAACTTTGGGAAAAGGTGTAAAACAGTAGCCCCATCACATTTGTGATACTGACAG
GTATCAACCCAGAAGCCCATGAACTGTGTTTCCATCCTTTGCATTTCTCTGCGAGTAGTTCCACACAGGTTTGTAAG
TAAGTAAGAAAGAAGGCAAATTGATTCAAATGTTACAAAAAAACCCTTCTTGGTGGATTAGACAGGTTAAATATATA
AACAAACAAACAAAAATTGCTCAAAAAAGAGGAGAAAAGCTCAAGAGGAAAAGCTAAGGACTGGTAGGAAAAAGCTT
TACTCTTTCATGCCATTTTATTTCTTTTTGATTTTTAAATCATTCATTCAATAGATACCACCGTGTGACCTATAATT
TTGCAAATCTGTTACCTCTGACATCAAGTGTAATTAGCTTTTGGAGAGTGGGCTGACATCAAGTGTAATTAGCTTTT
GGAGAGTGGGTTTTGTCCATTATTAATAATTAATTAATTAACATCAAACACGGCTTCTCATGCTATTTCTACCTCAC
TTTGGTTTTGGGGTGTTCCTGATAATTGTGCACACCTGAGTTCACAGCTTCACCACTTGTCCATTGCGTTATTTTCT
TTTTCCTTTATAATTCTTTCTTTTTCCTTCATAATTTTCAAAAGAAAACCCAAAGCTCTAAGGTAACAAATTACCAA
ATTACATGAAGATTTGGTTTTTGTCTTGCATTTTTTTCCTTTATGTGACGCTGGACCTTTTCTTTACCCAAGGATTT
TTAAAACTCAGATTTAAAACAAGGGGTTACTTTACATCCTACTAAGAAGTTTAAGTAAGTAAGTTTCATTCTAAAAT
CAGAGGTAAATAGAGTGCATAAATAATTTTGTTTTAATCTTTTTGTTTTTCTTTTAGACACATTAGCTCTGGAGTGA
GTCTGTCATAATATTTGAACAAAAATTGAGAGCTTTATTGCTGCATTTTAAGCATAATTAATTTGGACATTATTTCG
TGTTGTGTTCTTTATAACCACCAAGTATTAAACTGTAAATCATAATGTAACTGAAGCATAAACATCACATGGCATGT
TTTGTCATTGTTTTCAGGTACTGAGTTCTTACTTGAGTATCATAATATATTGTGTTTTAACACCAACACTGTAACAT
TTACGAATTATTTTTTTAAACTTCAGTTTTACTGCATTTTCACAACATATCAGACTTCACCAAATATATGCCTTACT
ATTGTATTATAGTACTGCTTTACTGTGTATCTCAATAAAGCACGCAGTTATGTTAC (SEQ ID NO: 130)
Homo sapiens dystrophin (DMD), transcript variant Dp427m, exon 44
(nucleotide positions 6535-6682 of NCBI Reference Sequence: NM_004006.2; nucleotide
positions 1127547-1127694 of NCBI Reference Sequence: NG_012232.1)
GCGATTTGACAGATCTGTTGAGAAATGGCGGCGTTTTCATTATGATATAAAGATATTTAATCAGTGGCTAACAGAAG
CTGAACAGTTTCTCAGAAAGACACAAATTCCTGAGAATTGGGAACATGCTAAATACAAATGGTATCTTAAG (SEQ ID
NO: 954)
Homo sapiens dystrophin (DMD), exon 44 target sequence 1 (nucleotide
positions 1127547-1127601 of NCBI Reference Sequence: NG_012232.1)
GCGATTTGACAGATCTGTTGAGAAATGGCGGCGTTTTCATTATGATATAAAGATA (SEQ ID NO: 955)
Homo sapiens dystrophin (DMD), exon 44 target sequence 2 (nucleotide
positions 1127595-1127643 of NCBI Reference Sequence: NG_012232.1)
AAAGATATTTAATCAGTGGCTAACAGAAGCTGAACAGTTTCTCAGAAAG (SEQ ID NO: 956)
Homo sapiens dystrophin (DMD) exon 44/intron 44 junction (nucleotide
positions 1127665-1127724 of NCBI Reference Sequence: NG_012232.1)
GAACATGCTAAATACAAATGGTATCTTAAGGTAAGTCTTTGATTTGTTTTTTCGAAATTG (SEQ ID NO: 957)
Homo sapiens dystrophin (DMD), intron 44 (nucleotide positions 1127695-
1376095 of NCBI Reference Sequence: NG_012232.1)
GTAAGTCTTTGATTTGTTTTTTCGAAATTGTATTTATCTTCAGCACATCTGGACTCTTTAACTTCTTAAAGATCAGG
TTCTGAAGGGTGATGGAAATTACTTTTGACTGTTGTTGTCATCATTATATTACTAGAAAGAAAATTATCATAATGAT
AATATTAGAGCACGGTGCTATGGACTTTTTGTGTCAGGATGAGAGAGTTTGCCTGGACGGAGCTGGTTTATCTGATA
AACTGCAAAATATAATTGAATCTGTGACAGAGGGAAGCATCGTAACAGCAAGGTGTTTTGTGGCTTTGGGGCAGTGT
GTATTTCGGCTTTATGTTGGAACCTTTCCAGAAGGAGAACTTGTGGCATACTTAGCTAAAATGAAGTTGCTAGAAAT
ATCCATCATGATAAAATTACAGTTCTGTTTTCCTAAAGACAATTTTGTAGTGCTGTAGCAATATTTCTATATATTCT
ATTGACAAAATGCCTTCTGAAATAGTCCAGAGGCCAAAACAATGCAGAGTTAATTGTTGGTACTTATTGACATTTTA
TGGTTTATGTTAATAGGGAAACAGCATATGGATGATAACCAGTGTGTAGTTTAATTTCAACTTGTGGTGTCCTTTGA
ATATGCAGGTAAAGATAGATTAGATTGTCCAGGATATAATTTGGTTGCTAAATTACATAGTTTAGGCATAAGAAACA
CTGTGTTTATTACACGAAGACTTAATTATTTTTGCATCTTTTTTAGCTCAAATTGTTCATGTTGCAATAGTCAATCA
AGTGGATTTGAATTGTAGCCAATTTTTAATGCCAGAAAATACTGATTAAGACAGATGAGGGCAAAAAACACCCAGTA
GTTTATTAAATACTTTAGATATTTCAAAATGCTGGATTCACAAAAGCAGTATCACATTTGACTTTACAAGTCTTCAT
TCTCAAATATGTTTCCATAGTAAATATGCCCTTTAATATTAAGGAGTTAAGCATTTAAACACCTATTTATATGATAA
GCTATTTAAACACAGAAAATATTTTTAAAACCTTGTGTAATTATATGTGTATCAATCAAACTTGCATGCACACCAGC
GTTGGCATTTGTATAGAGAGGAAATGTATGGATTCCCAATCTGCTTTAATATAGAAGATACATTTTAAAAATAGCAC
TGAAGTGAATTTTGGGCTAATGTAGCATAATGGGGTTTCTGCCTGAGAGGCAGAAACATATTAGAGTTATATAAAAT
GTTTTGGGGTAGATATAGAAACCACTTGCCATTTTCAATGATATCCAACCCAAGGTAGTTATATATTTCAATTTATA
TTTTATTATCAAATTAGTACTTATTGTGAAAAAAATCAAGTAACATAGAAATTTGTAAAAGTACCTCCATTCTACTC
TTTGGAGGATAGTTGTTCAGTATGAATTTTGCTACATATTTCAGGCTGGGTTTCTTGGAAAGCCATTGTAAAATGGA
GATTTGTATGTAGAAGGTTAACTAGGGAGTACTTTTACGATGAAGCAATTTGTTTTGATGTAACTTGGTGTAGTTTT
CTTCATGTTTCTTGTTCTTGAAGTCAGTTAAGCTCTTGAATCTGTGCATTTAACATTTCATCAAATTTAGAAACCTT
TCAACCATTTTTTTAAAAAAAATGGAACTCCAATTGTACATTTATTAGGCTCCTTAAAGTGCCCCACTACTCACTGA
TGTTATGTTCATTGTCTGTTTGGTCTCTCTTTTCTCTGTAATTTGTTTTATATAATCTCTATTGTCAAATTGACTAA
TCTTTTTCAAAGTCTAATCTATGGCTAATCCCATGTAGTATATATTTTTAACATCAGACATTTTCATCTCTTAGAAG
TAAAAGTTGGGTCTTTTTATTTCTTCCATGTGTCTACTCAACATGTTCAGTCTTTACTTTCTTGACTATATGGAATA
CAGATATAATAACTGTTAGAATATTCTTCTCTACTAATTTTATCATCTGTGTCTATTCTGGGTTAATTTAAATTGAT
TTATTTTTCTCCTCATTAAGTGTGTTGTTTAACTGCTTCTTTGGATGACTGGTAATTTTTGACTATATGCCAGACAT
TGTGAATTTTAACTTAGCGCGTGCTTGATACTTCAAATAAATTCAAATATATTGAAATAAATATTCTCAAACCTCGT
TCTGGAACACAGTTAATTCACTTGGAAACAATTTGATCTTTTGAGAATCTTCCTTTTATGCTTTGTTATGACCAGAA
CAGTGTAAGTTTAGGGCTACTTTTTCCCCACTACTGAGGCAAAACCCTTCTGAGTACTCTCTCTGATGTCCTGTGAA
TGATAAAATTTTTCACTGGGGCTCGTGGGAACAGGTGGTATTACTAGCCACGTGTGAGCTCTGGTGATTGTTTCCTT
TAATTCTTTTGTGAAGTTCTTTCCTTAGCTTTGAGTGGTTTTCTTGCATACATGAACTGATCAAGACTCAGATGAAG
AATAAAATAAAGCTTTCTACAAATCTCCAAAATTTCCTCTGTGTATATATCACCTCTCTGGTATTTTGCCCTGTGAT
CACTAGTCAGCCTTGGGCTGCTGAAACTCTCAGCTTCATCTTTTAACAAAAGCCTCCTGGCAAGGATCACTGTCCTT
CAATGTCTGATGTTCAATGTGTTGAAAACCGTTGTAGCATATATTTTGTCTTTTTTTTTTTTTTTTTTTTTTTAAGT
GTTTCAGGTGTTTCAGGCAGGAGATTAAGTTCAGCCTCCTTTACTCCAACTTGAAAACAAGTCCAAAACAAACTATT
TTGATGTAATTTGATCTTTTAATACATTAACATTACACAATTTTGTGAATATATCATAATTTAAAATTTTCAGAGAA
TGTCTAATGGTCCTCATTTCTTGACAGTGTGGTTTAGTTGAAACTGATGAACATTTTATCAAAACTTTTCCCCTCAA
TTGGATACTTTTTTTTTTTTGAGATGGAATTTTGCTTTTGTCACCCAGGCTGGAGTGGCATGATCTCAGCTCACTGC
AACCTCTGCCTCCAGGCTTCAAGCAATTCTCCTGCCTTAGCCTCCCGAGTAGCTGGGATTACAGGTGCCCACCCCCA
CACCTGGCTAATTTTTGTATTTTTAGTAGAGACGAGATTTCACCATGTTGGTCAGGCTGGTCTAGATCTCCGACCTC
AGGTGGTCTGCCTGTCTCAGCCTCCCAAAGTGCTGGGATTGCAGACGTGAGCCACCATGCCTGGCCAACTGGATAAT
TTTAAAAAGACCATTTTATTTAGTCTATTTTTTCTCAATCTATAGATGAGATAAGAAAAATCATTCTAGATGTCCAA
GGAAAAATTCTTTCAGAAAAGAGCTGTGAATGATATCACAAACCCCCCAAACAGTTAAGGTATTTCTTTCCTGGTTA
TTTTATGTCCAAAATCATGCATATGAACATGTGCACACACATGAGCGTGCACACACACATGAATACATATACACGCA
CATAATGTACCTTAGGTTATCTTTCCATTCTGAGTAATTATCGTAAAATGGGTAAAATCAACCCCGTAAGATACCTT
CATCGATAAGGCAAATCAAAGCTTTGGTAATTTCTGCTATCTTGGCCTTTGTTGATTGACTAATAATGAATAAGAGA
ATGAGTTTCAATATTTACTATGAAATTATTTTAGAAGACAGGATGTAGACAGTGGCTGTTAGCAGGCAATTGTTTGG
CATGAGCCAGTAATGGTTACTGTGAAAAAAATCAACCAAGCAGCCCATATATTAAACAAACACACGCAGAAGCACGT
TGGAGTCTGAAGCCTCATATGTACAATTTTCAGTAAAGAAATAACTTTTAGATATGAAATAAACAAATAGATATATG
TTGTAAACTTGTCCCTATGTATTTTGATCAAATTGCATCATATTTTTTTCACTTTAAAGAAGAGAATTTAGTGCTTT
AACTGAGACTTAGTGTTATCATTCAAAATATACTGACTGCCAATAGCAGTAGAAAGATAATCTGGTTCCATGCAACT
CTATTTTTTTTCCTCTGTCGCAAGTAAAAGACAAAATTAAGTACATGAATTAGTGCTTTTTGAAGATATTCCAGAGC
AATATACCATGCCACTATGGAGAACCTCTCTAAAAATATCCCATTTTTTTACCTGAGAAAAATATTGATCATGTTAT
ATGCCACTCAAATTGGTTTATTAAATTCGTTGAATGATATCAGCATCTCTTAATGCATTCACTAAACAAGCAGTAAT
TGAGTGCATATACAAAGTTTTATCATCCACCAAAACAGTGACAATCCACATGAGGCTCTAATAGAAGTTTAGAAAGG
GGGTTAAGTGGTTAAATGCTGGACTCAGAAAGATTGGATTCAAATCCCAGGTCCTTTAGCTTAATAGTTGTAGAATC
TTGTGAAAATATCTTAATTCTTTTCATGTCTCTGATTTCTCTTCTCTAAAATGGAAATATAAATGAGATGTGTATAA
AGCCACTTGGAATAGCATTTTGCACAAAATAATTACTCATTAAATGTAAGCCCCTATTATAACTAATCACTCTTTAT
AAGTGATTAGTTCATATCAATACAAACTAAGACTTATTTACTGAATTATCGTCTCTAAACATCCACACTGCAGAAAA
ACCAACCTGGAAATTTCATAAAACCTTATTTTTATGTAGTATAATTTCTTCTCAAAGCATAAGGGCTCTTGGATTAG
GAATTGAGGAAAATTCCAATTCAGCCAAACGCATCTGTTTCAGATAGCTGACACTTCTGCCTACTCATTTCCTAGCT
AACAAGAAGAAATGTTAATGGGAGTTTTCAAAGGAAAAGCTGAACACCATGAAGGAAAGTGACACAAATAATGTTAG
CTCATATATTGACAGGGTGAATTTGTGTGCTTTCAAGTCCCTTCAGTGAAAATAGGAAAGTAGAAATTATAAAATGC
CCTAACATTTAAAGCTAGCATGTTCTTGGAGACTAGGAAAAAATAAGTTTTAAAACATGGGCTATGATAGAATGAGA
TGGAAAATGTTTGTAGTTGCCAGTAGAAACAATAACAATTACCATTAGATTAAGTATTTAAACCAGCTGAATATTTT
TATTAATGGAAATGGCATCTGTTTTATGAAATAATGCTGCTGAATGAACCATATTAAAAATGACCAGTATTTCCTGC
AGAACGTTGTCGCAGACATACAAGCCTGAGACCCTAAAATCTTAAGGTATTCCATTTGAAATCGACCTTAAGACATT
AACAGTAGTGGTATTGTTTAGATGAAATTTTTTAGGCTTTAAATCAACAAATGTTAAGCAGACATGGGGAGCGAAAC
ACCAGTGTGTTATTCTGACATGAATAAACTGCTGTTTTTAGGGAAAAAATATAGTCTTGTTAAGGTTAAGCTAATTG
GTTTTCTGGTATCTTTTGCAATGTTAGTGTGTTTTACTGCTCCATAACCTATGTTATATGGTAAATGTGCAATATAT
TTATATATGTTGCTGTAAAGAAATGTAATAAAAAACTGTTTACTTTGTGATATGAAAGTAAAAATTTATTCATTGTC
ATTGAGCATACAGAAGTAAATATGGATTACATATGTCATATTTTAATGTTCACATGGTCCCACCATCAAATGTTGAA
AAACTTATAGTTTAACGTCATATTCTATTGAAGAAAAATACACTCCCTTTTCTCAAATGTGAAATGTCCAGAGAGAA
TGGAAAATTACATATAAAGCATGTAGTTATAGCATGGTGACCCTGCTGTGATCTCTCAGATGAGGAACAAAAGGGAG
AAAGAAAGAGCACACTGGTGCTTTGGAGTTGAGAGAAGGCAAAAAAAGAGTACAAAAATGTCAAAGCCAAGTTTAGC
TGCTCTTCAGCTCTCCCTTTAGCTGCTCTTCAGCTTTACCTTACCATGGTTATTAGTGATTGAAGAAAATTCTAAAG
CACTTTTTAAAGGACCCAATTCTGAAGAGTTTAGATTCAGAGAGCACAATGGAGTTGGAGTGACTCCTGCTCAAAAG
TTTGAGACAAGCGAGTCCATGAAAAGACCGTCCTCCTCTTAATGGAAATACCCAGGTTTTCTCATTCTTCTCGCCTT
GCTTTCAGCACTCGCAGCCCAGAAAGCCCTTATCTAACAGGTACTGCCGTTGAAAGGTCATTGACTTGTACAAAAAT
GATGAGTGCTGAATAGATGTGCATAGGTCACTGACAGTATCTGCTACAGAGAATGAGTTTTCGTATTTTTATTAGGA
TACACCTAACATGGCAATCTACTGCCTCAAAGAACTCTATAGGAGGTAAGTGAATTTATATTAATACAGATTGAATT
AAAGGATAATCTAGAAAAAGGCATATGATGTAAAAAAATCAGACACAAGTATATTTTCTGTATAGTCAGTTTTTACA
TTGTGATTTCACCAGCTGGCTGCTGAGTTTGACGGCTTCTTAACAGCCACACTGCTGAGATTCAAATGCTGATAGAA
ACTTTGATGGAAAAATCACTGGAGTAAATATTTCTACCATCTGTTGCCCTTCACTGGGACCCTAACGTTAAGAATAA
TTCATACCATTGCTTGTCCTTTATATTTCCCCAGCAGTAATAAAATTTCATAAGATTTTGTTTTGTGGTCACAAAGC
TATCCTGGTTTCTGTAACTAGAAGACATACACTAGCATAAGGGAATCAGCCGGAAAATTTACTGCTAAGAGAATTTG
TCTCTAGTCACTTACTTTAAGGTTACAGCAATGTGTAAGTGTGGGAATACATTTTAAAATGAGCTTTTCAAAGTTAT
TAGCTGGTAGTGGCATGAGAGTTAAGTCTCTTAATACAGTTAAACAGTTGGGCACTTCATCCTTGCGTAAATATTGT
TACCCTTTTATTGCTGCTTGGAAACTCCTCTGCAACTTTTTGGCCCCTATCCATCTTTTCAGAAGTAGTAAATAACC
AATTTACTGGGAGTGTGGTACCAGGCAGAAATTCCGAGAGGGGCTTTCAATCCTTGCCCATCAAGTGTATCTTTCAG
AAATAAGTATATTAAAATAATTGGATAATTTCAGTGGCTTGTTATTAGACTTCCGTTGTCCAGCATGGCATGTTTAA
GAAGATGACAGATTTTCATACATTATTGGAAAGAAGCAAGAACAAAAAAACATAACTTACTGTAGTAACCACGGTAA
AGAACTGCTTAAAATGCAGGATAAACATGTCATCCCTAAGGGATTCCCATTCTTAGAGCATGAAATTATCAAGAGAG
TAAGAGACTACAAAAAATGAGAAGAATGCTGATTGCAAATTCCAAATAGAAAAAATCAAAACAAAACTGCGCACCAT
CATTCTGGAAGCAATGAGAAGCAGAAATTGTCATTTAATGAAATGTAAGATTAAAGTTAATAGAAGTAATTTTCATG
AAATAATATTTTGCAAGGACGATGTTCCAGCCATATTGATCTTCGTGTTTTCTTTTCACATCCCTTCTTACTGTTCC
CTAGAATGCTTGTTTCTACCTTTAAATTTGCTTTTCTCTCTACCAGAGGGCTCTACCCTATCTCCAGTTTCTCACCA
TGTCCCAATCTACTCCCTCTCAGAATTTTTGTACACTTCCCTTTATATATATTTGTGCTCTAATTTTATATTCACAG
ATATGCCTTTTGTAACTCCCCCATCTTAAAGAAAGCACACACGTACGCACACATGCACACACACAAAATTGAACTCT
TTCTGGGAGATCTGCTTAACTTTCTTCATAACTCTGTCACTTGCTGAAACTGTAGTATGTGTTTTCATGTTTATTAT
CTTTTCCATTAGAATGAACATATTTTGGGTACTTGGTCTTTCTCGATCACCAATATACCTCGGTACGTAGAAAAATT
GATTCATATATTGAAAATGTAATATTCAGTAGAACGAATAAATACATAAATAAATTTAAAAATGATACTTTTATTGT
ATTACCTGAGACAAATGATCCCCAAGTTTGTCCTTGCTTTTCATAGCCAAAACATTCTCTCTTACATTGAGCTTCCT
TCACCTCTTCTGTGTACAGAGCACTTAAAATTTTCACATTGCCTGATACTTTAACAATATGATGGCCCTGTTCTCTT
ACCCATTGGAGCATATGTTAAATACCAGAACCCATGTAACAAACATATATTGTGATCCTACTGTGTGCAAAGCAGAT
ACTGCTTGCTGCTAGGAATACAGAGCTGACTAAGAGCTCCTTTTCTCTTTATGAGCTCACAGTCTCATGAGTTCAAC
GTCTTAAGGCACAACGTCTAAAGCAAAGGGCAGTAAGTAAACACTCCAGAAAGTACTGGATCTGGCCTAGGACAAAT
GGTGGGTTGTTTTTCCAGCTGTTATTTTTCCTGCCCCCTAATTGACAGTCCTCCATTACACCTCTGGGATACCTAGT
CTGACTTGGGAAAACCTGACTTTGGGAATCAGAGGCAGTCTCTCTTGCTTATATATGAGGAACTCTAATGGATACTT
ACTGTCATTAGAGAAACTCTGCTTCTAGCCTGGCTCCTTTTGTAAAGAAGGTTGAGTCCCCTTGGAGAGCCTGCAGA
ACATAACCATTTGCATGTAATGAACAGTTTGTAATACTTTGAGATTGATGTGCAATTTCTATTTGACAAGGGAAAAA
CAATTAGGATTAACCGTGGTCGTATATCCCAGAATACCAACGTTGTTTCCACACTCTAAGTGTTGTTGGGTCATTAT
ATGAGATTCATAATTTTGTCCTGTTGTACCCACGTTTGCATTACCATTCAGTCTTAATTTATTATACCCTATTAAAA
GTTTTTTTGGTAATTTGTTCTTATTGCTACTCAGGCATTAAAATGTCTGCAGGCTGTGAAAATGAATAAATTTAATG
TGGCAGCATAGTTCTCAAAATCCTGGCTTTACAACTCATAGTACAGGCTTGTATTGTAAATCCTAGTTAACATGGAT
TTATTTGAAAATCCAATTTTACTGCTAATCTTAAATAACACATTTTTCAAACATTTTATCCTTGAATTTCTATTTTT
TTATAATTTATGGCTGTTGTATGTATTTACAAAAGGACAATGTGTGTACTTTTAAATACTAGTAATGGATTGCTGAA
ACAACTGTAACTTTAAAACAATGCAATTGTTAAAAAAATAAACTGTGCAGCCTGGCTTAATGGAGGCTTATGAACAT
ATGATTAAGATATATGCTATAATAAGCAAATTCACTCAACTGATAGTTCATAGGAACTTTCAAATTTAATCTCATAA
CCAGTGCTATCCTTCAAAGAATGGTCAGGGCAATTTAACGAGTACATGACCACGCAAGATAATTTCATTGAAGAGTG
GCTGAACTGTTGAAATATTTTCTAGTCTCCTTGGGATATCATTAAGAGCAGAAATTTTGAAATGGAATTGTAATGAT
GTTCAGAAAAGATAAGTAGGTAACTCTCTTAATACGTTTTGTGCTGCTGTAACAAAGTACCTAAGACTAGGTAATAA
TTTGTAATGAACAAAAATGTATTGGCTCACAGTTCTGGAGACTAGGAAGTCTAACATTAAGGTGTCAGCCTCTGGCG
AGGGCCTACTTGATATGTCATCACATGATGGACGATTAGAGGGCAAGAAAGATCAAAAGGGGGCTGAACTCCCACTT
TTATAAGGGAACCAAACCCACTCGTGAGGGTGGAGCCCTCAATCCTTAATCACCTCCTAAAGCTCCCACCCCTTAAT
ACTGTCACAATGGCAATTAAATTTCAACATCAGTTTTGGAGGGAAAAACATTGAAACCATAGTAGTGATACTGACTA
CTACCACACAGGGCTTGGGAGGCTACCCTAGCTGTTGCACCCAAGAGATGAATCTTCTAATGTGATTACCTTTATCA
TTTTTTTTACTTTATTAAAATACTTTTATTTTACATGTATACTTTTGTCTACCCACCATTTCCATGTCTGACCACTG
CTACTACTATGTCCTAGCATAACATTCCATACATCCTTAAAACCAAGCAAAGGGTGGAGTTCCATCTTTAAAAACTA
AACAGGCATTTTGGACAACACATTCTTGGCAATGGAATCTGGACAACATTTATCAAACATGGTAGGGAAGGTTCTCA
CTCTGCATTATCAAAACGACAGCCAGATATCAACTGTTACAGAAACGAAATCAGATGGAAAATTTTTAACAAATTGT
TTAAACTATTTTCTTAGAGAGACTTCCTCCACTGCCAGAGATCTTGAATAGCCTCTGGTCAGTCATCTGGAAGCAAT
TCTTCACATAATTCATGAACTTGGCTTCCACTTTAGGAAGAGAACCACCTTTTTCTATACTTGCTTGCATTTTTGCT
TTAATGTCTTCTACAGAACTAGGTCCTTTGGGTGTTTTAGGAGTTTTTCCTTGTTTTGAAGGATTCTTGTCCTTTTG
ATCTTGGTGTTGACGGTTTTGAGTCTTTTCCATTCCGATTTGACTTTTGTGCATTTTTGGCTGGAGTATCTCATATA
GATTTCTTCACTGGCGCTTTTTCTTCAGTTTCCTCATCATCAAAATCATCATCATCATCAAAATCATCATCTTCATC
AGCAGCAAGTTTTACTTTTTTCTGTGGAACCTTGCTACCACCTCCAGGAGCAGATCGCTTTCCAGATATACTTATGA
GTTTCACATCCTCCTCCTGTTCGTCTTCTGACTCTGTATCTTCCTCCCCAGCTACTAAATGCTGTCCACTCACATGC
ACTGGCCCTGAACCACACTTCAACCGTAAGACCACTGATGGTGTTATTTCAAAGCCCTCAAGGGAAACCATGGGCTG
TACAGACATTTTCAAAGCTGCCAGTGTTACTTTAATTGGACTGCCTTTGTAACTCATTGCCTCTGCTTCAACAATGT
GCAATTTATCCTTTGCCCCAGCCCCTAAACTGACCGTTCTTAAAGATAACTGTTGCTCAATTTCATTATTATCCACC
TTAAAGTGATCATCTTTGTCGGCCTTTAGTTCACAACCAAAAAGATAGTTTTGGGGCCTCAGAGGACTCATGTCCAT
CATCGTCCATCAGGTGGCAGGACGCACTTAGGTGGGAGAGAAGGCAGATGATGATAAAGGACCACTGCTCAAGAGAA
CAGCTGTGCAGGACAGAATCACACCAGGGAGATTACCTTTATCTTAGAAAACCTGAACATCTTGTGTACTTTGACAC
TTCTCTACATTTCACCTAACCTTTAACATCAACACATTTATTCAGAAAACTTTTACTTTTGGAGCTGCTCTGTGTCA
GGCTCTATGCTAGGTGCTCAGGATATTGAAATTGATACAATCCTAACCTATTCACATATAATCCAAGGTTTGCTGAA
ATTGATGGACATTTAAACAATTGAAACATTTAAGTGGTATAATTAGCAAATGGACATTTAAGCCATAAAAATAGCAT
CTAATAGATATAATAGAGGTCGGTACACCATTGATGAGTCAGAGCAGAGGCAACCCAAAGAGTAACTAGCCAGAAGA
ATTGGGAAAGCTTCATAGAGAGAGCGATATGAAAATAAGGGAGAGAATTGTAAATCCATGAAAATGAGAAAAAGTTG
AAAAGTGATGGTGTCAGAAAAACTTGTGGTATGATAATGACAAGATGAGAGGAACTCTTGGTAAGCGTGTTGGATGC
ATGGAAAGAAATGGCACAAAATAATGCTGAGGACATTTTTTATTTTATTGTTGGTTTTGTTTTGGTTAATTTCATTT
TTTAAATCTAGTATGCTAGTGTTCATTGTCCAAACTGTGAATCATAAACTCAGTTTGTGGATCAACACCGGCCTTTG
ATTTTTAGTGAAACAAAATAGAAAATATCAGCATTCATCACAAATAGATGTTTCACAGATTTTTTGTTTTAATTGCG
ACTGTGTGTGTGTGGGTGTGTGTGTGTGTGTGTGTGTGTGTGTGTGTATGTGAGAGAGAGAGAGAGAGAGAGAGAGA
GAGATGGCTTGGATGTTTATCACCTCCGAATCTTATATTGAAATGTGATTTCCAATGTTGGAGGCAGGGCCTGGTAG
GTGTGATTGGATCATGTGGGTGGATCCTTCATGAATGATCCCTTTGGTGACAAGTTAGTTCATGCTATATGTGGTTG
TTTAAAAGAGTATGAGACCTCAACCCCCACCTGTTTCCTGCTCTCCCCTTTGCCTTCCACCATGGTTGGTTGTAAAC
TTCCTGAGGCTCTCACCAGAAGTAGATGCCAGTGACATGCTTCCTGTACAGCCTGCAGAACCGTAAGTCAAAAGAAA
ACCCCTTTTCTTTTTAAAGCACCCAGTTTCAGGTATTTCTTTATAGCAATGCAAGAAGGGACTAACACAGTTGTATG
TGTATGTGTGTGTTGGGTGATTTCTGGTTGAGTGTCACAAGGTTGTAATATGGTGAGTGTAAGGAAGTATAAGTTTT
AGAAAATTAAGAAGCCAGTTCAGAAAACTAATACTTTTGGAAAATAGTACAAAATCAACTTTACAAGAATATACACA
GAAAGATGTAATACAAGATTTATTTCATTGCAGTAATTTATAAAGTTGGTTTAGTGCCTTGCTTTTGCATGCTGTTT
TAAAAATTACCAAGAATATGACTTCATGTGATTTTGAAATACTCCCAGCAAGATAGGTAGAAAAGGTATTCTTATAA
CTCTTAGACAAAAATTTCGGAAAGTTTAAACGCTTTATCCCAAATCATAAAGCTAATAAATGAAGAATCTGGGATTC
AAACACCATATTTTTTTTACTGTTCATCAGCTAGAAGTTAGAAATGTTAAGCCAAAAACATTAAGTCACTGCTCTGC
CTAATAAATCTTGAGGAAACTAATAAAAAGAATAATACCACTGACTACAGGACAAGGTCTTCCTAAGAGACCTTAAA
TATATTAAGTGATGAAGATGAAACTTCTTTTATTCATAAAAATGTTATTTAGTTATGAGTAGAGCTCTAATTAAACT
TATTTTATATTGTCATCAGTAAAGTTGAGACATAACATATTTATTAATATAATTATAATTTGACCCATAGTGTATTA
AAAGAAGGATGTTAAAAGGAGTTGTTATTAGAGATGATGTTAGGGTTGTTGATGATAATAACAGTAGTCATAACATA
ACAAAGCACTTCATAATTTAAGAAGTGCCTTCAATTACATTGTTACTCTCATGGTAATCTCTGTTTGATATATAGAT
TTGGCGGATTCTATATCACTCTAAGACATAGGTTACTGAGGTGACGGAGGAATTTAGCAAGCGGCTGTCAAATGGAG
GACATGAGCATTGGATTGTGTATGGCAAGGGCTGATGGTCTCTAAGAAAGCCTCTTGGTTTCCACAGGGCAGAAGCC
CTTTGAAGATCATAGCCAAGGATTTAGTAATTGCCTCCCTTTCAGAATACCCTCAAGAGAAAAGCCCACCATAAGAC
ATGGTTCCCTACAGGCAAAACTGCTTTTCCTTAAAATTTACTGTTCCCTGAATATCAGCCTTCTTTGGCTCATTCAA
CATAGTTTTCTTAAGTTTCAGGACAGTGCTGCAGACCAAAAGTTTCAACATTGAGGAAAACAATACTACTTGTGCAG
TGACCCTACCTCAGTCAGGGAGGCAGATGCCTGCCTTTATGTGAGGGAATAAGGAATCAATCATATTTCCAGCACTC
AAGAAAGCCAGTCTAGTGCAGGGAGAGATAGATACATAAACCTCAAAGTTATGATATAGCATAATAGTTTTAAATTT
CCATAATAACTGTATTTTAAAAGTTTTATAGAAACAGAAGAGATGACCTCAGTCTGGAAAAGCCAGCTTGGAGAATG
GCAACCAATATTAAGTGGCAAAAGCTTTGGGATCCCAGGCCTCCAGATGGAGGGTGATAGCATGGGCCAGACAGGTA
GGTTAGGAAAACTTTGCAAAGGACATTACACGGTACACAGACAAGTCTGTGTTTTAGCCTATAAACCACAGTTGCAG
AATGTGTTTGAGCAAAGGCTTTTGGGGATGAGATTTGCACTTTTCAAGATTTAAGTTTGTTTAGGATACTTACGGTT
TGCTGTATACTTCCTGGGTTTTTACATTATAATTACGGTTTGAACTTTAAAGGAAAACTGCAGTTTAGCATACTTGA
AAGAGTGCAACTTCAAGTCATGATTGGAGACAGATATTTAACAGATTTTGTGATCCTGTGATGCTTATTTTCTTCTC
AGACATACCACATGACAATCATTTTTAAACAGTTTATTTCTACTTTAGCATCCATCTGAAGGTGTTGTGTATGTTTT
CTGCTTGAAAATAAAGCAGTGGGCTGGGTGCGGTGGCTCACGCCTGTAATCCCAGCACTTTGGGAGGCCGAGGCAGG
CAGATCACTAGGTCAAGAAATCGAGACCATCCTGGCCAACATGGCGAAACCCCATCTCTACTAAAAATATGAAAATT
AGCCAGGCGTGGTGGTGCATGCCTAGAGTCCCAGCTACTTGGGAGGCTGAGGCAGGAGTATCGCTTGAACCCGAGAG
GCGGAGGTCGCAGTGAGCCAAGATCGTGCCACTGCACTCCAGCCTGGCGACAGAGTGAGACTCTGTCTCAAAAGAAA
TAAAAAAGAAAATAAAGCAGTGAATGCGATTAAGATGGATTTATTATGATCATAAAGTACTCAGGAGTCTTATTTTA
AAAGACAGCATTACTGTAATTAAAAATATAGGGAAGAAACTAATGCTGTTTTGCGTATCATTCTCAGCTCTCTCAAA
ATCAGATATTAAGCTCTTGCTGCCAAAGGAGACTATACTGCACGGTGCTCACCTGCATAAACTTTGAGAGGGTTGAA
TTGTGCCAAGCAATTCTCTCAATACATAAATTAACCAAATATTTGTTGACCTACTGTGTGACAAGTATTATTCCAGG
AAATAAGAGATCCAGCAATGAAACAAGTATGGCTTCTTATAGAGTTCCCAAAAAGGAAATAAAAGGATATACGTATA
GTGATATCCCTGAATTAAATTTCTCTTTTGAAAATAAAAATTCTATCATAAGCTGTAACTGCCAACACTTCAATACT
CATTCAGCAGTTTTCAGGGATTTGTACCTTTTGACTTATGAGAATTTGGAAGTCTAATTGTATCATTGCACTGGAGT
CTTAAAGAAACAGATAAGCGAATGACTTTGCCTGTATCATTGTTGACTGTACTTACAATCAGAAAGGGGCACAGGAC
AGATGCCAGGGAGTAAGTGGACAGCCCATAAATGGAATGGTAAGAAAGAAGAACTATAGTGGATTTGGAAAGTTCCC
TTCAGCATTTTCCCTAGACAATCTTTGGCTGTGTTTGCATGATCAGTATTTCATTCACAGGATATTGAGCTCTTGAT
ATAGTTCTCAAAACCCAAAATGAAATAAGAAGTCTACTCTTTATTTAAATTCAAATTCCAGAGAGTTAAGTAACTTT
CCAGGAGGTAATCTAAATATGGCCTCCTTGTTGGGGGGGGGGGGGGTGTTTGAATTTGCATATAAATAGTCTCACCC
TTAAAGGAAAACCACAGATGGTGGTAATGATGTAGTCATAATGTACATCTCCACAGTGGTGGAACAAAATATCCACA
GTTTTGCTTTCCCCAGTTTCAGTGACCCATGGTCAACTGCTGTCTGAAAATAGGTGACTACAATACAATAAGATATT
TTAAGAGAGAGAAAGAAAGATCACATTCACATGATTTTCATTACAATGTATTGTTATAATTGTTCTATTTTTATTCA
TGATTTTTAATCTCTTAACTGCGCCAAATTTATAAATTAAAATTTATCACAAGTACATATAGTTTATATAGGGCTCA
GTACTATCTGCAGTTTCAGACATCCACTGGGAGTCTTGGAATGTATCCCCTACAGATAAGGGGTAAACCACTGTATC
CTATTTGTGTGAATGCTACAGGTGTTGTGAGCTCATAACAATATGACATCAACACTGAACTAATCCAGGATTTGGTA
GTGAGAGTGATGTATTTGCAAGGAGTGAGACGTGGTGCCTCATCCAAGCAGAGAAATAATTTTGAAATTTGCCTGAC
AATAAAAATCACAATGTGAGGTCTCTCTTTAGAGCTGCAAAGTCCAATTCAGTGCCCCCTAGCCACATAAGATACTG
AGCTCTTAAAATGCGGCTAGTACTAATTGAGATGGGCACTGAGTATAACACACATGCCAGGGTTTGAATACTTAGAA
CCAAAAAGGAAGTAAATGCTCATTTATTGCATGTTAAAATTATGGTTTTATTATAGTTGATTAAATAAAATATATAA
TTAAATTGACTTCATTTTGCTTTTAAAAATGTGGCTATGAAAAATTTCAAATTATATATGTGTGTGATTACATATGT
GTGTTTTCACATATGTAACTGATGTTACATGTGAAATTGATTGTTACATGTGACATGTAAAACACGTTACCTAACAC
GTGCATATGTATGCAACACATATGTAACGTGTTACATATATAACACGTTACATATGTATTGTTACATGTGTGCTTGC
ATTACACACATGCATAATATGAAATTACATGTAATTTCAAATTACATGTGTATATTTTGAAAATTACAAATTACGTA
TTTTGTTATTTTTGCTTTACAAAGTCAAATTTACCCTATTTAATAAAGCATCATGAGTTTTTTATAACTAGTAAACT
TTGAGACTTTTGTAGGAGAATAAATAATGCTTATTATAAAAACTGATTGGAAAAGTGAGCTGGAGCAGGGAGCGGAG
GAAAAAGGACTAGAGATCACCTTTCTTCCCAGCTCCGCTCCTCTCCCAACCTTTTTTCTTTCCATTCTCTCATCCCA
ATTCAAAAGTGCAGAGTTCACAGTTGGTGTGCTGATTTAGAAAACAGATATATAAACAGCCTTAAATTTTCTCCAGG
CTTTTACAATGAAAAGAAGTTCAATATCAAAAGTAACAATATAATCTGTGGAAAGGTATAGGGGGCTATGTTTTTGA
GGTAGAAACTATAGGTGCTCCTGGCCAAGCATGGTGGTTCAAGCCTGTAATCCCAGCACTTTGGGAAGCTGGGGCGA
GAGTATTGCTTGAGCCCAGAAGTTTGAGTCTAGCCTGGCCTACAGGGTGAAACTCCACCTCTACTAAAAATACACAC
ACACACACACACACACACACACACACACACACACACACACAAAAGCCTTGCGTGGTGGCGCTTGCTGATAGTCCCAG
CTACTCAGGAGGCTGAGGCGGGAAGATTGCTTGAACCTGGGAGACAGAGGTTGCAGTGAGCTGAGATAGCACCACTG
CACTCCGACCTGGGTGACAGAGTAAGACTGTCTCAAAAAAAAAAGAAAAGAAAGAAAGTATAGGCACTCCTTATATG
CAGCTGCTCACACCCCTCCTCCTTCACACCCCTCCCCCTTCACACCCCTCCCCCTTCCCCAAAATTTGCAAGGGGAA
AAATGTGTGTAATTGGCAGTATTTAGTGGCGTGCAACCGTGAGTCATCAGACTGCACATCCTCACTTCTGCTAGTGG
CTCAGTACCCAACAGCACTCAGTGAAAACTAACTCATTTCAAAGGTGAAAACAAGTGAGTTTGGCCACCAGGGAGTG
TTCAAAACTGTCAGTGCTGAAGCAAATGTGGAGGGTGTTCTGTAGTTTGTTCAGGTTGATATTTGTGGTCCAACCCC
TAGCTGAACTACTAATTATTAATATCTGTCTTGATGGTGCCTCAGGAGAAAGCTTCTCAAAGGGAATCAATGTTCAA
ATTATAGTAGGTATCTTGGCCATGGAAGTTATTGAATTTTAGCCAATACTTGCTACTCTTTCATTTATAGTGTGAGA
ATGCAGTGTAATGAACCTGACTCTCACTGTCCTGACTTGCCTTTCTCATCGCATTCACAATAAGCACGTCAATACGT
ATACACATTTCATATTTCTAAAGTTTACTTTATTTCCTTATTGTACATCGCTGTGCTGCTGATGGAAGAGAAAAGGA
AAAACACTATTGATTGCAAAACTGTTTTATCTTTGGTGGCTTAGATTTTTTTTGTATGATATGTAACGTCTTGCATA
CCTAAGGCAACACGAAGCTAAATAGATTTGCATATAGCATGTATTTTTTCCAATTAAATGTTTAATTTTGTTCAGAG
TATACTGGGGACATTTTGAATAATGGAGAAAAGTACAAAGAAAATTCATAATTCTACCACCTATCAGCACAGTGAAA
TTTTATGAAGAAACATAATTTTCATGTAAATCATAGTGAACTCACGGTAGGTTTTATTTAATACAGTAATTGGAGAG
CTGGTAGGAAGACAAAACTGGTTCAAAAGAGAATACAAGAAACAAATGCTTCTATAATGAGTGAATTTTTAAAAAAG
TATTCTGGAATAAGATTAGTGAATAAGATACTAAACTCGTTGATACCCTACAGCCTTTGGGGTTATATCCTCTACTG
GGTAAAAAGTCATTTACATCATATCAGTTTTCTAAAATTTGCATTGAACTTCATAGCGTTGTAACATGTGTGGGCCC
AAATTAATAGTAAACAGTAAGAGTTGCTTTACTCTGAAAATATTGAAGCTCTTGTGAGGGTGTGAGGAGTTTGTTAG
AAAACAACGCTACCATTATTTTGAAACACACACGATCATCTTTTGTTTTACTTCTAAGTTTTGGATAATTTTTCTTA
AATTATCTTATTATCTTATCCATTTTCTTAATTTCCTTAACCTTTTAAATGTTTCTCCTAGGCACTTTTATTGATTT
TTGGAATATAGTTGATATGTGCTGAATTTTTATCATCCAGTTTTAATTCTACTGAAAAATCTAAAAGATGTTCATCA
ACTACTATATTTCAAATGCATACATCCCCTTTCATGCTAAAGAAACTGTATGGGAAACACAGTCTGACATTTTCAGG
ACCTGGTATCATTAAAAGTCTTGACACTGTTAAAATTAAACAACGCCTTTTTTAAAATCAAAGGATACAAAAGGGCT
GTGTTGGTCAGAGGATACAAAATTTCAGTTAGATAGGAGACATAAGTTCATGAGATCTTTTGTACGACATAGTGACT
ATAATTAATAATAATATGTTTTCGAAAATTACTAAGAGAGTCGATTTTAAGTGTTCTCACCGCAAAAAAATAGTATG
TGAGGTAATGCATATGTTAATTAGCTCATTTTAGCTAGTCCACATTTTTCAATACAATGTGTTGTATAATACGTGAT
ATATACAACTTATATTTTCCAATTCCAATAAGTAAAAATAAATGTAAATTATTTGAAATAAATAAAATGTGAAGAAC
ATCCACTTTTCATATGAAACCATGAGATATTTTCTGTTAAAAGATTAAATGTCCAATAAATTTTTGATGTTAACAGA
AACAAAAATGTTTAATATTTAAATACATATTTGCATGCTATTGACCCCCTGAAGTTCACTGCTGGGCTAAGTGAACC
AACTATATCTTAAGTCAAAAATGCTGAAATTCTTCCCCAAATCCCAAAGCTCATGAAAACATAAACAGAAAATTTCC
AAATAATTCTACAGGGAAAATAAGACACACTATTTGATCTGATCAAACAACGGGATGATTATGGTTAATAATGAGTT
ACTTGTACATTTAAAAATAACTAAAGGAGTGTGATTGGATTGTTTGTAACACAAAGGAGAAATGCTTGAAGGGATGG
ATACCCCGTTCTCCATGATGTGATTATTACCCATTGCCTGCCTGTGTCAAAACATCTCATGTACCCTACAAATATAT
ACTCCTACGATGTACCCACAAAAATTAAAATAAAAAAGAGAGGGACCCGAAGATAAGCTAATATTTAAGCTCATCAT
ACTTATTAAGATAAGCAATACATACCGAAAGTAATAGCATTTAAAACCAGATGTTGGGGGAGGGTTCTAACTTGTTC
ATTAAAATTCAAAGTCACCTGTCTTGTTTTTTCTTTTGTTTTTGTTTTTTTTTTTTTTTTTTTGAGATGGAGTCTCG
CTCTGTCACCCCAGGCTGGAGTACAGTGGCGCGATCTTGGCTCACTGCAAGCTCTGCCTCCCGGGTTTACGCCATTC
TCCTGCCTCAGCCTCCCGAGTAGCTGGTACTACAGGCGCTGGCTACCACGCCCCGCTAATTTTTTTGTATTTTTAGT
AGAGACGGGGTTTCACCGTGTTAGCCAGGATGGTCTCGATCTCCTGACCTCGTGATCTGCCCACCTTGGCCTCCCAA
AGTGCTGGGATTACAGGCGTGAGCCACCGTGCCAGGCCACCTGTCTTGTTTTATCATGATCCCGAGAGTATATATGT
ATGTGTACAGCTCATCTAAACCCTTTTTCTTTCAACATGATCAATAGATTGAACATTGGAGATATTTTATAAGAAAT
AATGAAGACAACTCAATCAGCACATATATATATTAAATGTGGAATCTATAATGATTGCGAAGCCTGAAGCAAACTAA
ATATTCAGTAATAGGTTCTTTTTTTCCATGGTATATCCATTTGAATATATAACATAAATGCCTTACATTTGTTTTAA
CTATTTAAGGTTTATGTTGTTAGTGTGATGAAATGGCTGGCAAAAGTCAGAAACTCAGGAAAGTTTCAGGCTTATAT
CTGGAGCCTGGTTTTCTTTCTTCAAGGTAGAACCTCTGTGAAGTGAAAAATTTTTTTTATATCTGGAGCAATAATGT
AGAAGCTTAAATGTATTATCCAAGTTGTCATAAGCCTATTATTTCTTTACATTACTGAAGTGAAAGACAGCATTAAT
GGCTAAATGCCATACTTGGCTATAATTTATATTGTTTAGGACTGGAAATGAGCCTGAAATGTACATTTTTTTCCAAA
ATAGTTCATGTAATATTTGAAACCTGACAAGTAACCTGATGATTTCATGGAATACCATCAAATATAAATGTGAAGTT
TTAAAGACACAGGGAAATACTCAGAATAAACCCCCTAACCACAGGCCAGCAGAAGAACTAGACTTGAGAAAATGAAT
GGGAAGATAGATAGTAACAAATGACTTCTTTGGCAGCCTTATATATGCTTAGTCTTATAGACTGTTTTATGGATGCT
CTGCACTCTATTTCCAGCAAGTATGGCATTTGGAACAGGACCACACGAGACAAACTATGAGTTCACATTTCCCACAA
CTGCACAGATAGAAAGAGGGAACAACAGAATACTCCCTTTCTTCTTGAAACAATAACTTCTGTTGAAGCTCACTGGC
TTCTTTTCAGCTGTTTCTGCTAGCTCCTCCTCCGCCTCTTGACCTCTAAGGCAATGCTCTTCAAAATTTCAAGACTG
CTTTCTAATTGAAACAAAACTTATAAGCACATTTCTTCCCACAAAATGTACATTTATTTGTAAATCATATATGAATA
TGACTAAGCATGTAAACGTATGTGAAAATAGAAATCAATAAATATAAATGCAAACACAAATAGAAGCATTCACAGTT
TTCTTTTGTGTCCCAGTGAGTTGTTCCAAATTCCTCGGAGGTAGGTATGTCACAGTTTGAGACTATACCTTCAATCC
TAGGGTTTCTGGTTTCGCTCTCCTCCTAGGTGATAGCATCCATTTCTACGGACTTAACTGCCATCTTTAGTTGAATA
ACTCCTCTATCTTTCCATCCCATATTTCTCTTGATTCCAAACCTGCTTGTTCACCTGAGCATATGACACAATTCATT
GGCTGCCGCACATGCAGCTTTGACATTTTATTTAAAATCTTTCCCCTTCCCCAGCCCTCATCTATTTCACAGTAGTA
TCTTCTTCTTATCTACTTGATTGGTAAGCAGAGTCCACATGATTCCATCATTTATCTCCCATTTTATATCTAATCTA
TAAGCAAGTAATGCAATGCAACTTCTGTCTCCAAAAATTTATTTTGAATTTGCCTTCTCTTCCTCTGCATCTCCCCC
ATCTTAGGCCAGGTCACCTCTGCCCTCTTGCCAGATTAGGTCACATTCTCTTACTACTGTTGTTATTCTCTTCCTAT
TCAATCCTACACCGCAGCAAAATGGATCTTCTCAAAATGTCAGCTAGATAAAGGCATTTCTGTGCTTAAGGCCCTCA
TGGATTTATCTTATTAGGATGAACACCCAACTCTTTATTATGGCTTAGAATACAATGAATTACAACACATAATGAAT
ATATTATATTTCTATCTTTACCATTTTCTTCTTAAGTCAACCTTTCTCAATCCATATAGGATAATCATATTAGTGCT
TCCTCACTTTCTAAAACATCTCAGGGCCTTTGCACGTGTTTCTCTGTTCTTAGACCCAGAATGCTCTTCCTTTTCTC
TTTGTGTAGCTAGGTGCTTCTTTCCATTTACGTATCACATGAAATGCAGTCATTCCCTCCTCCTTCCCTCACTACCT
CACAAAAAGTTGATGCCTCTGTTAAACCATGAATGGAATTTTACTCGGCAGTGAATAGAGGAAAAACCAATGGTAAA
AGCAACCATATGAATGAATGAATGTCAAAAATATTATGCTGAGCCAAAAGTCATAGACACAAATATGGGTATTTACA
TGAAGTTAAAGCACAGCAAAACTCAATTACGGTAATAGAATTAAGAAAGTGGTTACCTCTGGGTGAGGGTTGGAATT
GAGTGGACAGAGGCATTAGTGACTTTTTCGGGGTAATGGAAATGTTGTCTATTTTGTTCAGGTGGTGAATACATAGA
TACATTCAATTGTCAAAACACATCCATCCAAACACTTAGACTTTTGCACTTTATTATATGCAAATTATGCCTCAACT
GAAAAAAGTTTGTTTTCAAAATTATATCAACAGTTGAAATTCTTTTAAAGATTTGATTCAAATGAGATTAATTCTGT
ATCCATCATTGATGTATGATAGTTTTGTATGTAGTTAAGGTTATTGGAGATAATTGAAAGTTATACTCACAAGAAGG
CTGCATAATATGAAGTTTATCTGCCTTGATCTTTAATAGCTTTCGCGATTTCAACTTCTTCACAGCTCTGTAAGAAG
GCAGTGTGGCATGTTGAAGCAAGCATGTGTTTTAGAGTAACACAGAGCTGGTATACAACCCCATGTCTACCAATTAT
CAATGATGTGGGTATGTTGCTGGATCTCAATAATCTTCCACTGTGAAATGGAATGTAACACCTGACTCACAACGCAA
AGGTATTTACCTTATGTAATATAATTCCTGCGATCCTGGGACCTCCCTTAATCCCATCCACAGATGCCAGGTTAAAG
ACCCCATCACAGACTAGAACAAGTTGGGATGTCAAAATGAATAAATATTAATCGAAGGGCCTATTGTGATTGAACAC
CACGCAGTAGGCACTCTCTAATACCTACCGTCTCCCTCCTTTTTGGGGGAAACATTCTAAATGTGCAAAAAATAAAG
GGTTATTTGCTTTCTGGCACTTGGGATCGATTTATTGAGGATATGTTAGCAGAACAGCAAAGGTGAAACACTAAAAG
CACCATCAATACACAGGCAGAGGTGAAGCCATAAAGCCTTTATTTTTTAAATTAATGCACAATATATAAGAGGTATG
TTAGAATGAACGTCCAATCCCTGAAAGGATATACGAAAGACATTCATAAAATTACATGGGCATGTTTTCTTAATGTT
CAAAATATTGTTTTAATTAGTGTATTATGAGTTTATTCATGTGTCTGTGTGTTGTGTTATATTAATCTTTTCTTGCA
TTGCTATAAAGAAATACCTGAGACTGGGTAATGGATGAGAAAAGACACTTACTTGGCTCACAGTTCTGCAGGCTGTA
CCGGAAGCATAGCAGCATCTCCTTCTGTGGAGGCTTCGGGAAGCTTCCAGTCGTGGCAGAAGGCAGAACGGGAGCAG
GCACTTCACCTGGCTAGAGCAGGAGCAAGAGAGACAGAATGAAGTACCACACACGTGTAAACAGCCAGATCTCAGAG
AACTCACTCATCATCATGAGGATGGCACCAAGAGGATGGTGTTAAACCATTCATGAGAAATCCACACACATGATCCA
GTCACCTCCCACCAGGCCCCACCTCCAACACTGGGAATTACATTTCAAGATGAGATTTGGGCGGGGACACATATCCA
AATGATATCCATGTTTAATCAGAAAAATAAAAGTTAACAGTAACAGTGATTTTACTTTGTAGACCTTTGCTAATGGC
TGAAATCTAGCTCCATTCCGAGAACAGCCTGCGGTACACATTTTGAAAGATAGTTGATTAATATGAAAGAAGCCTTA
TCTGTAGTCCTTAAGGCCATTATGGTTTACATATATGAGTAAATATTCCAAAGTAGCCATGCCAGTTAACATATATC
CAGAGTCTAAAGGCCACTGGGCGACAAAAGTAAAAGATACATAGCAATTGTTACTTTATATCACAGTAATTCTTGTA
TATTTTAAATGGATATTTGCATTTGAGGATATCCACTTAAGAGTTAGGTACATGGCTCTTACATTTAAGTAACATTT
ACTTAAATTTCTGGCTGCAGCAATTCCACATAGGTAGAAATGAAGTCTGAATTGAGTTGGGGGTCTTTGCAGTGCTC
TCTCTGTTCATTGGCTATTTTGACAATGCTGAGAGATGTGGTTAGCCATTCTTTTTCATTTCATATTGGCAACCTAG
AGAGCAATTAAGCCTTCTCCCCTTAACTAGATGTATGTTTTACTCATTTCTGGATCTTTATGGCTGACTTTGAATCC
TAGCCTGTGGTAGAAAGCATGGTGTCAGAAGGAACTATGAGTTAAGACTATGCATACTTGGCTTTGAGTCTTGGGTA
TCATACCTCCCTCATAGAGTGAAGGAACCAGGGATTCTTCTTGAGGCCCAGACCCGGCATCCATGTTAAGAATACCT
GTGCAATTTTGCTTCCTGATATTTAAGGTGAAAATGCATGTTTGGGTCATTGTGAGGATTATGTGAGATGTTACTTT
TAAATATAGGCCCCCTTATTATATGCTCTCATAGTTTCAGGCAACACTTGTCGTATTTGTAACCTCAGTTTTAACTG
TAATGTTTCCATCAATGTCCCTCTTACCTGGTACAGGGGCTCTTCATATTCTTGGATTACAAATCTGTGAATGCAAC
CATGCATCAAAAATATTCAGAAAAACAATGAATGCCTACCTCTGTACTGATGATTTATAGGTGTTTTTCTTGTCATT
ATTCCCTAAACAGTACAATGTAATAAGTATTTATATAGCATTTACATTGTATTAAGTATTATAAGTAATCTAGAGAT
GTTTTAAAGTATATAGGAGGATGTGTGTAGGTTGTATGGAAATAGTATGTCATTTTATATGTCACTTGAACATTTGT
GGATTTGCTATCCGTGGGGATCCTGGAACCAATCCCCCATGGATACTGAGGGACAATTGTATTATAAGCAGCAAGAG
GGAAAGGAATCTGTCTATTTTGCCCAAAATCGTGTTCCCGGGACCTAGCATAGCTCCTGGCAAAGAGTATACAACAA
ATATGCATTGAGGAGAGAACAGAGGGAACCATTATCCCCTTATTCTCGCTGTTCCTTCATGTAATGAATAAACAGTC
AAATCTTACAAGAGATTTTAAACCAGTCAGAGAAAAGTTGGAAGTTAGTTAGTTGTTCATACATTGAGAAGCCTCGA
CGCTGTGTCATCTAGGTAATGAAAGATCTAGGGAAGTTTAGCAGGGAGAAGAAGAGAGATGATAGTTGTCTTCAAAT
GTTTGAAGGACTGTTACGGACACAAAAATTTAAACTTGTGCTGAATAATTCCAAGAGGTACACAGTCTCTCGATAGA
AGCTAAAGTGGGGGGTGACATTTGACTCAACAAAAAGCCATCTAAATATCAGAACTTTCAAAAGCAGGAACTGGTGC
CTCAATTAATAGTGTGTTTTCTAGCACTTATGATACCTGATCATAGGCAAGATAATGAAAAATTGGGACCTGGGAGT
TATACATGGGAATTTGTTTATCAGTTGGGTGATTAGGAGAGGTGGCCTTAAAGTCCTGTTGTGTTCTAAGAGTCTGT
GATTCTGAGTCTTATTTCCCAACAAGAGAGGTACAGAGCAGAAGATGGGATTGGGAGAAATAGGATAAAGATACCAG
GAAATCCTAAAGGTAAGAAAAGGAAGGCAGACCTGAAGCTAACTCTATACTTCAGGTGCTTGCCTAGAGCCAGCCCT
ACCTACTTAGAGAATGTTGAAGAGCCAGTTAAAACATCTTTAACACGGATGTAAAACAAAACTATCAAAACCTGAAG
ATTTCGAATGTTCTAACCTACTCGTCAGTTGGGCTTTTTTCACAAATACTTCAGTAAATAGGCATAAATTTATTTTT
TAATGATAGAAAATATCTCTTAAAGAACTTATAACTGTGGATAAAAGCACCACCATAAAAATCTTGTGGTGAAATAT
ATATATATATATATATATATATATATATATAAAATTTTAAATATGGTTAGCTAGAATATGACGACAATGTTTATGAA
ACACAGAGACTCTTGACAAGTCCCATGTATACACTATAAAACTTTAAGTTATCCACTATTCACTCACTAAGCTTATA
CTTAATGAGTGTCTGCTGTGTCACTTATTGCGGAAGGCACAGGCGGTATAGCATTGCACAAAACATATGTGGTCTCT
GATGGAGTTTTTCAGTCTAGTGGTGAAAGCAGTGAATGGGTGTACAGATGTTAAATAATTGTACAATTAGTTGCATG
TGTAAACGTCAAAGTTCAGAAGATGACAATTGATCTACGGCAATGTTTCTCAATCTCTGACGTTTTGAGCCAAATAC
ATCTTTGTTGTGGTGGACTGCCCTGTCCACTATAGGATGTTTGGCATCACAACTGACCTCTGCCCATTAGATGCCAA
TAGTACTCTCTTCTTTAATCACAAATTTGTCCCAGACATTTCCAAATGTCCCTTGGGGAGCAAAATCATCCCTAGTT
GAAAATCACTGGTCTAGGGGGAGGTCTTTATGAGGAAGTAACATCTAAGAAAGCTGGTATGTTTACATATAGCTACA
GTCTATTACACATGTATACATATGTAACAAGCCTGCATGTTGTGCACATGTACCCTAGAACTTAAAGTATAATAAAA
AAAATGTAACAAAACAATACAGTATGATAAGTGCTATGGGACCAAAGATGAAAGGGTTCTACTGCACAGTTATGAAC
TCATAGTTAGGCTTTTGGGGTCAAAATTTTGCTGAAGATATTTGCCACCCACGTGACCTTTGGCAGGTGACTTAGCT
TATTCATGCCTCAGTTTTATCCAATGTGAAATGGGGCTGGAAAGTCCCATGTACTTCCTAATAACTTTGCGGAAATA
ATATGTGGTTATATAGGAAAAAAAAAAAAATCCTAGAAGTATGCCTGCTGCGTAGTAAAAGGAAGGAGAAGGATAAA
GAGAAATCTGCATTTTTTCTTCTGTAATGGGGCAGATAGTAAATATTTTAAGTTTTGTGGCCCAAATAGTCTCTGTC
ACATTTACTTGATTCTGCAGTTGTGGCATTGGAAGCAGCTATGGACAATACTTAAATTAGTAGGTGTGCCTGTGCTT
TCAATAAAATTTTATAAATACAAAGTTTGCAAAACAAAGTTGTTTTTTTTTTTTTTGTAGTTTGCTGACACCCTAGT
AAAGAAGCACCATTGTCAACGTTAAAAATTATCAAATTTTTATTTTTCAAAGTTTTCAAATTTGCTTTGCTTGGTCT
AGCTCATGAAATAAGTCAAAAGTAGCAAGACCTCCACCTCTAAAATAATAATAGTAATGATAACCTCAAAAGGAAAG
AAGAAATATTTTTAAAGAAGAAAAATTATTGTTAAATAGGATTATTGTGCAGAGAAAACCTAGGAGACTCAATTTTA
AAATCTGTGAAATAATTTTAAAAATACTTTATGAATAGATACATAATAGCTTTTATTCATATTAATGACTATAAATG
CAAATGGAAATATTTCATTCACACTGATGACAATGTATAAATTAAGGAGGAATAAAAATTGTAGACCCTATAGGTGA
AAAGCATAAAAATATACATAAGAAAAAGCAAAAATTGACTACGTAGGATTGTTTTAGGATTTAAGATTTATTGTCAT
TAAACTTGCAATACCAGCCAAGTTAACATTTGAATTTAATACAGTTATAATCAGAATGCTTTTGATGTGTTTGGGGG
CAATATAATTTCAAAGGAAATAGGCAATGATGTAATTTAAAGTTTATATAGAAGGAAATTGTGTGCGTGTATGTGTG
TGTATAAATTGGAAACAATTTTATTAATAAGCATATTATGGCAGCAACATACACTTCCAGATTTCTACTATACTTTG
AAGTAATTGTGATCAAAACCACAGTGTGCTGGCATAAGGCTAGAGAAATGGGTTAGTGGTTTACAAGTGAGAGTCCA
GGAAAACATCCAAATAAGATTGGATATTTTAGTTCTGTGTGGATAGCCTATTTCACTTAATAAATAGTGTCTCGTAA
TTGACTATTCATGTACCTATAAGTTTAACTATAGACCAAAAAAACGCCCTACTAGATTAAGGAGCTAACTAGAAATA
TAAATTCATATAAACAATAAAGGAAAGTGTAGGACTTTATAAGCTTCATGGGAGACAGATTTTTGGTAAGTCAGGAA
GCCTGGAAGACTTAAAACATAAAATTGGCAGACTGAATTAACTGATAGTTTAAAGCTTCCATAGAGCAAAATAAATC
ATAAACCAAGTTTTAAAATATATAATGGATTTAGAGAAGGTATTTACAAAAATATATGACTAATGGAGGTTAATAAT
AACAATATGTAAGAAGGATATGAAATGGCATTTTACTATAAAGGTCAAACAAATGACCTATAAGCATAATAAATCAT
ATTAATCTCCACTAGTAATAACTACACACATCTACATAATATAGATGTTACGCCTGCATTTGATTTACTTTATCTGT
CTTTTGGCAGAACTATTTGTCACCAGATAAAAAATTCTATATCATTACCAGAAAGGTATATTATTATAATGTTTATT
ATGTTGCAGTTGTAAAAGAAATAACAGCTTTTCAATTGTTTACAAATCCTATAGAACATTTACTGAAATACATTTAC
ATTTTGTGGCAAACTTGGATTTAAATACCGTGTTCGTGCTTTGTTTTATGCCGTTTTCCCATCTTTTCTCCAGGAAT
TTGATTGTGCTTCATTGAAAGCTAAAAAGAAAAAAAAAATAATTCTGGTTTTGGTTTAAAAAATTAGGTTAGGGGTT
AAAAAGTTGTACGTTGTCTTCTGTAAAAATAAAAAACAAGTTTTCTTTGTTTCTTGGAGGCTTTATATTAAATGGAT
TTTTAATTCATAGACAGCATATTGTGATGAAATTTCCCCATGAGCTTCACATTTTGTTTCAATAGCAGAAACTAACT
TGGTTGCAGTTACTGCCCTTCTGAGAACAGTGTTCTGGAATAATTTTGACATACATATGTATCTCTTTTTAAAACAT
GTGTTAATCTTTTCATAAAGAAAGTTTTCCCAGCTGTGTCACCTGTGACTCCAACTTTCTGGGGGGACAGGGATATG
AGATGTTGGAAGGGAATGGCTTGAAGAAATAAAGTGCAAAAGACGTAATGCTTTCCTGTGGTAGAAATGTATTCAGT
GACCCTGAATGACCTTCCTACTCTTGTCCCTTCATTTTTCCCACAAGTATGGTCTGGGCAATTATAAAAATTGACAT
TTGCAGTGGGCTCTTCTGTAAAAGATGCTCAATCAGAAATGATTTATTTTAGAAAAAGAGATGATATAAACATATAT
ATCCCCTGTCTCGGAAGTGTGAAGGTTGAAAAGCAAGGAGATGATCTTCAAAGTGTCTAAAATATTGATTTGTAACA
TCGTTTTATGAAAGTGCTTCAGATTATTTTTTTTCTTGGATGGCCCCTTATGCTTTGGTCAGTTGATGCTAAAATCT
GAACTTCTTTATTTTAAAAAAAACTTTTAATTTTGAAAAAGGAAGTTCACGGTGCTGTCTAATTCTTTTTAGATAGT
CATTAATGTAAATGTAAGAGTCATTCTGAGAACCACATCTGCTGATATGTTCCGTTAAATTACAAGTTCTATGTGTA
TTTGCTTTGCTTTCATACAATGAATCTTCTTTACTCTCTTCCCCACCTGCCAGAAATTGCCCCACTCAACGTTCATA
AAAGGTCCATTTTCAATCGCTATATTTATTTCAGAAGCAGAGATATCATATATTCAAATTTTAGTTACTTTCCAATA
TCAAGCTAATAACTCACACAAATAAATCAAACTACAGCAAAACAGCAATCTAGCATTCAACAAAACCTCCCCAATGC
ACATATTTCAAGCTGTAGATATGTATCATCCACCATGCTGAAATAATGTACATGTTCAAATCAAATGGAAAACTAGA
ATCAAAATTGTTGATTACTTCTTATCAGGGCATTTTATTATATTTAAGAAAAATACAAATTAAATCATTTTCAGGAA
GCAATCCTTCTGGCTAAGATTTTTTTAGCATAATGCTTAAAGTTAATTGTTGATCTTTATCTATAAATTCAAAGGTG
GACTAAAAATGCAGAATCAATCAGGTAGTCCATTTTGCATCAGGTGAAATATATAAAGCATAAAACAGCGAGTTACA
TTTCCTAACAAAATTGAATTACAGTGAGTAAAAGTGACAGGACAAATGCATTAAGAAAAGATGGACTGAAATGGATA
GAGTAGAATATATGCATCTATAAAACACAGTCATATATAATACACTCATTTTTTTTCTTACGAGTGTGAGATTAATG
GAAGAAAACAACAATAATAACAAAACCAGTGTGATGTGTCAGATTTCACCTTTTAATTAAAAAATTATTCACTTCAG
AGGGGAATTTTCTTTCTTGGGTTAGCTCAATCATGTCAGATCTTGTTCATTTAAAAGGTCAGTTTACTTGCCTTCTG
AGGTTTTTGTTTGGGAAAAAGAAAAGAAAATAGATTTTCATTGGTATCCTGGGTAGAATTAATTGTTTATCATTCAT
TTTTAAGATCTCCGAGAGGCAGAAAAAGGGGAACTGTGCAACCCTTTTGTCCTTCTGGATCTCAAAATGAAGGGATA
CATTCTGCTACATGAAATGTGGAATTAAGACCATGATGCAACATGATAAACAACACAAATTTGGGGGTGTCTCTGTG
CTATACATTATTGAATTTTTCCATGCTATACACTTTTTGGATGTGTCTGTGCTATTTATTCAGTTTTTTTAAATAAA
AGTTTTTGTAGACTAAATTGCCCTCTCTACTTTGCATCGTTTTTGAACAAAGGATTTTCAAGACTGATAAGCTCAAA
TGTATCATTTATTGTATTCAAGTAGCATTCAATTTTTCTTTAGAAGTATAATTTGTAGATATTTTAACACAGAAAAC
TTGCAACACTGCTCATGATAGGCACTTATTATATATTTTTTGAAAGACTATATGGATAATGATTCTAACTTTGACTT
TTCCTGTTTTGCCTTCACTTTAGAATTAAGCAGAGAATCAAATCCATATTCCTGGGGGCGATGCTTGGACAACAGTA
TCTCTTTAAAGATCTTTGTGTGAGTCGAAGGTGCAGCCAGACTGGGAGTTATTGTGAAGAAACAGATTCAGGAAGGT
TGAGAAACTTGCCTAAGGCTAATCAGATAGTTACTGGCAATGTTGTTTCTAAATCACTGTTTGGCTCCCTCATTCAA
TGAATCTACACTATGTGGGACTGCCTCTTGCTCCTGACATCTTTTGCTGCTGAAATAAATGAACTCAAAGCCTAGAA
GGTAGAAAAGAGGGAGTTCAGAATTATATTCAGGCACAAATACCAATAAGGCTATTGCCCCCAGAACTGCAACTTCT
CTTGGTTTAACAGATAACTATTTAGCTGTGAGGTACAACTGAGGAAGTGGACACACAAGTTATCAGGAGATTCTGAT
GTGCCAGTTTATATTTCTTGTCACAGGTAATGATTCGAAATTTCTTAAAACAGCTGTCCTCACAGTGGAGTAACCTG
GGAGTACATGAAGGCATTCCAAGGAGTAGGCACAGATAGTTTTAAGGGAATTTATTTCTAGATCTTCTACTTTATTT
TGTACTCTTCCTGAAAACTGAATTGCCTGAAAAAAAAAAAAAAAAAAAAAAGACATCTGTAGTCAAGACCTCAGGCT
GTTTCTCCTTTCTAACCACTTGCCTTTTCTAACCACTTCTCCCAATTTAAGAAAAAAAGCCTTATATTTCATCCAAC
TCTGATCTTACTAAGGCTTCAAACAAAAGAAGCATGAATGACTTTCATGACAGGGCAACATAGCTTTTTGCAAGAAG
AGTGGTTGCTAACTCTTTGCTTTCAACTGAACCCGAAGAGAAGACCTGATAAGTTGTCAGCCGATAGATCATTAAAA
ATACGTTTTGGTAAGCAATCATCATGTACTTTTAGCATATGCCATAGCAGGAGCACAAATGATTAAGCAATGCTACT
ATAATACAATTCCTTCCGTTTCTTTCTACTCACCTATTTGAATAAGATTTTTCATCATTTACATCTATACAGACAAA
AATTAGGGATAGAATTGATGCTGAAGCCTTTCCAATTGTAGAATTAATTTATATTCTTCTGAAGGTGTATAAATTGT
TAAATACCCATCCATCTTATTAAGAGATGTATTTTCAATAAAATTTTATTTTTATGTTTATCAAATTTTATAATATA
CATATATTGTTTTGGTCAATTGCACGTTAATAATTGTAACAATACCTCAATTGAAAAGGTTTGTTTTTTACATTTAG
GACTTACAGTAACAGAAAAAAAACACTCATTGTGTATACATACTGTTTAAGAAAAGTATACTAGGTGATCAATAAGA
TTTTTTCAGGCATAAACATATATCTTAGTTTTAAGATATCGATATTTACAATGTCCCTCAAATTATATTATTTTCAG
TCATTTAAGAATGAAAAGTACATTTCGAATGCGGATTTTAAATCTGCAAGGGTTGACTCATTTTTCAAGAGTCTTTT
TAGGGGATACAGAAGCAAGAATGTTTGGAGTTCCCTGATCAGTATCTTTAAGAGAAGGTATTTGTTGGTAGTTCCTA
GCAAATTCCAACAGCCTGATGCTACTTAAAAGATAATAGTAATTATTTTAAATAATGCTTCTGATAAAAAACATTCA
TGCACACTCAGTTTAAAAAGATATTTAAACATTTGTAGTTGTAGTTTGGGAACTCATGATACAAGTACAGTCTGTAA
ATGAAGCTCTTAGTTTGCAAATATCAGAGATAAGCTATTAAAATGCAGAAATTGAAATTGCCCTGATATATGCATAA
ATTAGTGTCATCTCCATCTTGTCAGTTAGAGTATTTTTTAGATTCTCTCTATGTATACATACATATATATATATATA
TATTTATATATATATATATATTTGTGTAGCTGTGCATGTGTGTATTTGGACTAATGGGTCAAAGGACAGTACTAACC
CAATTCAATAATTAAAGAAAACATAATTTTGAGAATTAGCTTTATGGTAATTGTTTGACTTAAATGAGTAGATCAGA
GAAGAATAAGGGCTTTCCCTTATTTAAACAAGCTTCATTTTTTTATCCAAACATTTACTTAGCTGATTAAGCTTCAC
TTGTTTATTTTCTTCAAAGCATTCATTCAGGTGGGTACTGAGTAAACTGAAATATCACACCAGGGAACTTCAACACC
ATCCAAGTCTTAAAGGCTTCACTTGTTCACAGTTGGCATTTAGTGAATGTCTAGGCTACTGATAATATTGTGAGTAA
GTTGGCAGGGATCATAAGAAATGATAAAATACAGTTCTTGAAAATGTTATGGTTTGAGGAAAAGATCTATGTTTGGA
ATTAGACTGACTTGGATTCAAACTCTGGCTGTACCTTTGGGACAAGGTGTTCAGAAACTCTAGCCTATGTTTTTTTT
CTGCAAAATGATCCTCTTTTCCAGGATTCCTGTAGAGATTCAAAGATATGTGAATGTTTAGAAAAAGAATAGACTTT
TGATCATTGTTAATTCCCTTACTTTCCCCAATTAGACTTGTAAGACTGGGAAGAAAGCTACACAAAAGATTGAACAA
ATTATAGCTGACAGACCATAGCAAAAGATACAGGGCAAAACTTAAAGGGGAAAACTACACATTAAATTATTTTAAAC
CATTAAATAGCACTAACTTTTGTCAGATATTACAACCAAACACCACTCAAATTAAAGTAAACTGAATAAAATGCCTG
TTTTTTTCTGTTTACTGATGTTTTCATTTGCTTCATTCATTTATTGGAAGATATAAAATGTGTTAGACACTGTTAGG
TGCTGAGTGTATAAAAAAATCTTATTAATACAATTTAAACACGCACACACATATATATGGTTATAACAATTGATGCC
ATGTATGTACTGTTTATATGCCTATACATTATTCCACAGACCTGGGGGGAGGGGGATGTAGAGTCTTACCAGAACCA
TAGGAATCTTCTCACATCAACATTTCCTTTTGAAGTTTGTTCATGAGGCACCATCCAGATAATACTACCATCTGCAA
TGTGGCTTGAGAAGATGTTAGATTTTTTTATTACACATAATAAGGCTGTAAAGTATTTCTGTATTTAGGTAGAGGTA
TGTAATACAATATGTATATAAAATTACATATCCAATAAAATCTGGTGTTAAATAAGGACTAGCTTCTATGATAATAT
AGTCTAAAGGCTTTTCATTTGGTGTTATAGAAATTATGTGAAATATGTTTCCTGGAGTAGAATTATTCGCATTTCAG
CTCTCTGACAGTGGAAGAAAAGCTAGAGGGAGAGGTGAACAAGAGAGGGAGCATAATGGACAAAGCTTTGCTGGAAG
CCAAACCACCACTTCATATGTCAAATCTGACAGGCCTCCCATTTTAGGTGTGCTGTCATTGAAGCTTTCAGCTGCAC
CTTGCCTGTGGCTAGGCTATTTTCAAAGATTAAAATGCGAAACTGGAAATTAAATGCAACTTAATTCCCAATTTAAA
TTTCCATTATTTTTGAAAAGTAAAAGATTAAAAGAAATGTATAATTGCAATTCTGGTGGAAGAGGTAATTATAGGAA
AGGTGGGATGTATTTCAAGTGGGGGATATAGCTTACTGCAGCAGAGAGGAATCTAAGCTATCATTCTTTTGAAATTG
GTCTGGAAATATGTTTTCACATGGAAAATATACTATATTTTTAGGAATTTCCTTGTCATATTACTGTATCCTTTTCT
GTTAGAATATAAATTCTGAATTCCCTATTCCACTGTAGATCTGCCTCCGATTATATTAGCTCTTCTGAAGTTATCAA
AAAATAATGAGATATACAATATTCCATATATGTCAAAGCAATTATTTTTAGGTTAAGTAATAAACCAATGACCTTTA
ACCCGGTAATATTCTGGGTTGTTCATAAAAAAACTATATTCAGGTAATAATGTCTTTCCACTTAAGCAACTGAAAAA
ATACACAATACTTAACATTTGGTTAATTAAATACCTACTCCAGACAAAAGGATTTTCTGTTTTCAAGTTATCTTAGC
AAGCTGAGCAGGAAGCAATGATATATCCAATCAGAATATCCATGGAAGCTCTGCTACAGTTTCAAAAAGTTCTCATC
AGGCAGCTTTTAAAATGCCTACTCTGAAAATGGTCCAGGTTAAAGAACAACAGCTTCCTCGTCAGATAGCAGTATTG
CTTGGCCATGTTTCTTCCTAGCACAAAAAAGTACCTGCTCTTCTCTGAGTACCTACATTCTAAGGACTATGGCTTAC
ATAAAACAGCATGGGTTGGGGCAATTTCCAGCACACTGCTCACTCTCGAAAACGTATGATGCAGGTGAGAGTAATGT
TTTTGTTTGAATCTGCTTTCACTCGTGGAAGATGAAACTACTTGCAAAGATCTGTACTTTAGCTATTATGAGTAACA
AAAGACTCCTAAAATATTGCACACATTGTGGGGATGGAGAACCATCATCCTGGGATTTGATGGATCCTATGGTTTGG
CTTTGTGTCCCCACCCAAATCTCATTTTGAATTGTAATCCCCACAATCCCCACATGTCAAGGGAGAGAGACCAGGTG
GAGGTAACTGAATCATGGGAGCAATTTCTCCCATGCTGTTCTCCTGATAGTGAGTGAGTTCTCACAAGATCTGATTG
TTTTATAAGGGGCTCTTCCTGCTTCACTGGGCACTTCTTCCTGCCACCTGTGAAGAAGGTGGCTTGCTCCTTCTCAC
CTTATGCCACGATGGTAAGTTTCCTGAGGCCTCCCCAGCCATGCTGAACTGTGTGTCAATTAAACCTCTTTCTTTTA
TAAATTACCCAGTCTCAGGCAGTTCTTTATAGCAGTATGAAAATGGACTAATAGAGACGTGTCTCTCAGAAGTCACA
GTGATGCTTGAACGGATCCAGAGCTCCTTCTTCAGGAAGGTCCCAACTCATTCTGAAGGGTCTCTCCAAGCCCACCT
CTCTCTGTAAATGGGAAAGGTTTTACTTTGAGCACTAAAACCTGCCAGAATTCTCAATTTTCCTAACAGTGTGTTAA
TAAACACCTACTCATTTAGTATCCAAACCAGGTCTGTATTTCTCAATTAGAGCTCACCAGGCTTTCATCATAAAGTA
GAGCTTCAAATTGTCTGCAATCCCACTCCTATCAAAAACCTAGAAGGAGGTAATATTTCAGAGTAATACTATAACCA
GATGACCACATCTAAGAAACTGCTGACCCTACGATGTAACCTTCTGTCCATTTTTCCCTTTGGAAAGTCTAGGATCT
TTTCTTATACCAGCAAGTTACAAGCCTGGACTACACTAACTTGCTTTCCGCAGAAGAAAACACCATGAGTTCTGTTT
TCATATTAAGCACTTAGTCTCCATCAGACATCAATCGAGAAAAAATCATTAAAAATCACATTTTATATTTGATGTAT
ATTTCTCAATAATCCTATGTATTAGTTCATTTTCCTACTGCTATGAAGAAATACCCAAGACTGGGTAATTTATAAGT
AAAAAGAGGCTTAATGGACTCACAGTCTCACATGACTAGGGAGGCCTCACAATCATGGTGGAAGGTGAAGGGGTAGC
AAAGGCATGGCTTACATGGTGGCAGGCAAGAGCGTGTGCAGGAAAATTGCCCTTTATAAAACCATCAGATCTCCTGA
GACTTATTCACTGCCATAAGGACAGCACAAGTATTTAGCTCCCTCAGCACAGAACCATCCCCGTGATTCAATTACCT
CCCACCAGGTCACTCCCATGACACATGGGGATTATGGGAGCTACAATTCAAGATGAGATTTGGATGGGGACACAGCC
AAACCATATCATCCTATTTGGATGATCAATATTATCAAGGTATGCTCCCCTGAGGGGGCGTCCTTTTTACCATTTAA
CTCCAGGACAAAAGTTTATTTCTTTGTAAGGACAGTGTTTATTTCTTATGGTCCTATTTTCTCCTAAGATCCAGACA
CCAAAATGGCCATCTATCATTGACTTAACTCCTGAATTTTGCTTAGAGTAACAGATTTAGTGAATCTAAATATTTTC
TGGCTGTGGAATGTTAATTTATACATGTTCAAGTTACCTTTGATTCATGTGACAGTTTGTGCCAAAACACACTCATT
ATCAGAACTCAGATCATTATGTTGGCTCTTGTTTTCGTTACTAAAGGAAGAAAAACAGTTTCTCAAAAAGAAAATTC
TGATACCTAGGAAGACCATTATACCTCACTCTTTTCTTTATCTCATCACCACATCCAATATTATAAAAGAACTTACA
AAGTAAAAAGAAAGGTGTTCTGTAGATGTAGCGCCTGGCTTGTATGGTAGCTTAAATGAACACAGCTAAAAATATTT
TATGGCTAGTGTCCAAAACAGTCTGGCACCAGACAAAATAAGAATATTTAAAATTATATTTTAGAGTTACTTTAAGA
GGAAGGGAGAGAGAGATGTAGGCAGGAGGAGGAGGAGCAGGAGGAGAGGGAGAGAGAGAGAGAGAGAGAGAGAGAGA
GAGAGAGAGAGAGAATCTGGGGTTTCTATGGAAGGGCTAAGAATATGTAGAAAACAGTTTACAAAGAAATATGGTCC
AAGAATCGTGTGTACACACACACACACACACACACACACACACACACCCCCTGGAATATTTTTCAGCCTTAAAAAGA
AGAAGATCTGTCATTTGTCCCAACATGGATGGACCTGGAGGACCTTATGCTAAATGAAATAAGCCAGACCAAGAAAG
AAAAATATTGTATGATCTCACTTATATATGGAATCTTTTTTTAAAAAAGGTCAAATATATACAGATAGTGAATTAAA
CAGTGGTTACCAGGGTCAGGGTAGTTGTGAGGAAATGGGGCAATGTAGGTCATAGGATACAAATGATTAAAATATAT
TAATATATTAAAAGATATAATATACATCATGAGGACTACAGTTAATAATAGTGTGTATTCAAGATTTTTGATAAATG
AATAGATTATAGCTGTTCTTGCCACAGAGTGAAAAATGGGTAACTGTGAAATGATAGATATGATAATGTTCTCCACA
ATGGTAACTATTTTACACTATATATATAAATATCTATGCATCTTACACCATTATGTGGTATCCCTTAAATATATACA
ATAAAATTTATTTTACAAACACATATTAGGAATGCATATTCTGATTTTTAACAATAGTTAACCTCATTAATATATTT
CACACTATCATTTCTAGTGTACATGAAAAGTAGTTTATTGACATTAGTTGTAAAAAAAAAAAAAATGGTCTTGAGAC
TTTTGGGTCAGAGAATGTTCTGGCCATAAGGTAGGTTTCTGCTTGCCTACTAGATATCTTAACTTCGATTTCCTGAA
CATCCCATCACTTCAGAATCTCTCAATCCTTTCTAACATCCGCAACATTGTTTTTCTTTCTGCATTTCTTATATTGA
CTGATGGATTTATAATTCACTTTCTCTGAAAAACCCTGCAGTTATCATATATCCCTATCCATTCTGGCTCTTTATTG
CCCAAATCTCTACCAAAATCCTGTCAGCACAGCCTCTGAAATATTTCTCAAAGCATTTATAATCTGGCTCTCATCAA
CATTTTCAACACTCTGTTTTATCATTCCACTATTTTACATCATTTCATTTTCATTTTTACCACAATCACTCATCCAA
CAAATAAGTATTTAGCTCCCTCAGTAATTAGTATTATTATTATTAATTATAACTAGATGCTGAGCATACAGAAGTGA
ACATGACAGACATAATCCCAGCAGGGATGTCAGACTTTATGCAAGTAATCAACCATGATGAATCTCATGAGATTCTG
AGAGAGAGAGAGAGAGATTGAGAGAGAGAGAGAAAGGGGAACCACTGGTGTCCGAGTTAGAAATTTGAATTAGTATC
TGGGTCACCAAAAGCTTCTGTGAAGAAGTGATATAGACTTGGCCACACAAAACTACCGTGAAGGTGGTGGAAATTTT
TCTATGCAGAGTACCACATTTAAAGAGCTAAGCCTGAGAGTGTCAGAGATAAAGGAACAGAAAGAATGTGACAGCAG
ATTATGTTTGGAAGAAAGATGTTCAAGAGACCAAGCTAAAGAGGAGATGGGGCTAGAACCTGGAGGGTCCTTCGGGT
CCTGTTGGGAGTTTTTTCTCTGCCCAGAAGGGCTTTGTCACGTGGTTGTCAGGAAAGAGTCATGATTAGAGCTTTGA
TTCAGAGACTTCTTTCGCTGAAGTGTGGAGAATGGTTCAGAGAGAAGCAAATCTGAATGGACAAAAGAGGTTATTAT
TGTAATCTTGGCAAGAAGCGATGGTGGTCTTGACTAAAATAGTTCTAGTGAGAATGTGACAACAAACCTGAGAAAAA
TACAGGAGACGTAATTGACGGGGGTTAGTGTTAAGTTGAACGATTGCAGAGTTGAATTTGAGGAAAGTGTCATATAT
CATTCCCAGTTTCTGATGTCATACACCTCTGGAGATAACACTGCCATTTCTTTTGAAATGGGAAAATAATAAGTGAT
CAGTAAGTACGTATTGGATAAAATAATGAATGGTTAAATGCATAAGGGGAGAGGAAAAGAGTTGCAGAGAAAGAGAG
TAAACGTATTTTGGATGTGTTAATTTTGAGATACCTTTGAAAAATCCAAGTGAGGGGTTGGGTAGTCAGAGAAATGA
ATGTGGATGTCAGGACGAAAGGTGACCGTGATGAACTGTATGTCTTCCTCTAAGCACGTTATACAGCTTCATGTCAC
AAGTGACTCACTTCATGTCACAAGTGACTCACAAGGTCACTTGTGACAAGCATTTGCCTGGTGCTTCATCCCTAACC
TCCCTTTCTATACTCAGCTAAAATGTCACCTACAATACTTCTTCCTTGACTCCACCGTCCCCACTTTACTGATATGA
ATACATTTTAATAAAATGATATAATAATGCTTAGTTTGTAAACCTAATGTTCCTCAAGTGGTATAATTATCTGATTT
GTATGTGATCATCAACCCAACCATATTAGGAGCACCTTGAAGGTAGAAGATTTAGGTTCATGCTTAACACCACATCT
GGACCACTGTGGATTTAACTTTCTACAATGATTGTATTCATTAATATATTGGGTGCCCACTATATTCCAAGTAATAT
CCTGCACACTACGTACAAGGAAGCATAGGTCCCGTGTGCTCATGAAACTGTAATTTTAGTAAGCAGGGATAGGATAC
AAACTGAGAAAGGAAAACAATTTAGAAAGTGGGAAATATTATGCACAGAATTAATAAAAAAGAGAAAAATCTTGAAA
AAGTCTTCAATACCTCACTTGGAAGGTGATTTTGAAGAAGAACTGATGGACAAACTAGAGTCAGCCATGTAATGATG
TAGGGGCAAAGCATTCCGGGCACAAGGGACAGCTTATGCAAAGACCTTAAAAATGAACTAGCTTTGTATGTTGGAGA
AGGATAAAGAGAACTAAGGTATCTATAAGGTAATTAGGAAGAGGATGAGTTATTTAGTCCCTTAGTCTTTGAAGCAC
ATTATCTCATACTTCAATTGAGTTTATTCTTAGTGTCATTCTTCTGGATGCAATATTTGAGATAAATGTCTTAATGA
ACGTTCACCTCCCTCCGTAGTAATGCCTGAGTGTCACAAAAACTTTTTTTGTTTACATACGTAGCCATCTAATGGAA
ACATAAAATAGGAATCAAAAGTTGAGTTTCATGTACAAAAGGTAAGGACTGTACATGTGGTCATAACAACTTCAAAA
GCACCTGAAGGTAACCTTTAAGGAAGATACAAAGGCTAGGAAATATCTAGGATCCATGAAGACAGACTTACTTAAGG
TCATAGTGTGTCCAGAGTTGGTTCCCGCCGGTGGGTTCGTGGTCTCGCTGACTTCAAGAACGAAGCCACGGACCTCT
GCGGTGACTGTTACAGCTCTTAAAGGTGGCACGAACCCAAACAGCGAGCAGCAGCAAGATTTATTGTGAAGAGCAAA
AGAACAAAGCTTCCACAACGTGGAAGGGGACCCAAGCAGGTTGCCGCTGCTGGCTTGGGTGGCCAGCTTTTATTCCC
TTACTGTCCCCTCCCATGTTCCATTTCTGTCCTATCAGAGTGCCCTTTTTTCAATCCTCCCCACGATTGGCTACTTT
TAGAATCCTACTGATTGGTGCATTTTACAGAGCGCTGATTGGTGCGTTTTACAATCCTCTTGTAAGACGGGAAGGTT
CCTGATTGGTGCGTTTTACAATCCTCTTGTAAGACAGAAAAGTTCCCCAAGTCCCCACTCGACCCAGAAAGTCCAGC
TGGCCTCACCTCTCAATAGCATTAAGAATATAGTTTCACGAGCATATATGAATCAAAACTTACATTTGCCAATTTTA
TTTGCTTGTTTATGTGTTTCCAACATGTCTTGTCTTAGGGCCAAATGTTTCCCTAGAGAATAACTATTCCAACTATC
TTAGTTGCTGTATTTTTATGCAACCTTCAACTCTCCATACTAAAATGTCTCCAGAATAGAAAATAAATCTTTTCAAA
GTTTCAAAAGAGGCTCTCTATATATTCCCCTTAAAAGTACCAGGCAGACATATTTCTAGGTTTCTAACATTGCGTGT
TGCCAGGAAGTATATCCAAACCATCACAAGTTATTCATGTAACCAAGCACACTTATTGGAGTGCTTCTGCTTCTGTT
CTTGCTTGAAATTGGAAGCTCCTTCCAGGAAAAAAAAAAAATATCTATAGAAGGGGAAAAAAGTAATTTTACTTTGA
AAATAAAATATACGTGAGCAATAGTTTTATTCTGTTTTTAATTTACCATAGCTTCCAAAGACAACATTGTTTTATAG
TAGGGGTTAGCAAGTGTTTTCTGTAATGTAAACGTAAAGGGCCAGAGAGTAAATATTTTAGGCTTTGTTTTCTATAC
TCTGTTGCAACTATTCAACTCTGCTGTTAGAATGTTGAAGCAGTCATAGACAATAGAGAAATGAAGATGTGTCATTG
TGATCCAATAAAACTTTATTTACAAAAATGGCAATGGGCTAGTTACGGCTTGAGGGCTGCAGTTTGCAGACTCTCAC
TTCAGAGCTAACAGTTGTTGTCAGGAGTCACTTGTTTTTGGAAACCTACAATGAGGTACTATAACACCAAAAAGAGT
TATCCCTTCCTTTTTCTCTCTCACTTTTTGAATTATGAGAAGAATTAGAAATGTAGTTAATGATAATGTCCAACCAG
TGTAATTATACTTGTTAGAAACACAGCTGGAAGCCTGTTGTCCAGTCTTATTTCTCCTCTGTGATCCTCATTTTCAG
AGGTTGAAGTCATAAGTTTGCCATGTCTACTTTCTGACAGGGGAATTATAATAATGTGGAGTCACCTTTTGTTTGTG
ACTTTGACAATGCTTCATTGACTTACTCACCAATTTTCTAATTTTTATGAAGACTTTTTGCCGAAATGTAGACTCAG
TCTTCTCTCTTGTCTACTCTTTCTATAACAATTAACAATGAACTTATTTACCTTTTTAACATCTTTTTAAAAATTTT
CTATACACCTTGAAAATGTGAATACAAAGTAATGCTGCATCATGTATATTGCCTTATTCACACATAGCCTCTTATGG
TATATCATATAAAAATGGAACAATACAGCAACAGGTTGAATGAACAGTAATCAGGTAACAGGAAAATGAGATGTCTT
TAATATTTCACTTAAAAACTCAATTTCCTAAAGCATACATATAAATATTTGGAAGTATAGTTAGAAGAAAAATATCT
TTAAAATATTTTAATTGATTAGTCTTATTTATAAGATAATTTTTAGGAGGCTGGTTGCGGTGGCTCACACCTGTAAT
CCCAGCACTTTGGGAGGCCGAGGTGGGCAGATCATGAGGTCAGGAAATCGAGACCATCCTGGCTAACACGGTGAAAC
TCCGTCTCTACTAAAAATACAAAAATTAGCCGTGCATGGCAGCGCATGCCTGTAATCCCAGCTACTCGGGAGGCTGA
GGCAGGAGAATCACTTGAACCTGGGAGGCGGAGGTTGCAGTGAGCCGAGATCGCGCCACTGCACTCCAGCCTGGTGA
CAGAGCTAGACTCCGTCTCAATAATAATCATAATCATAATAATAATTTTTAGGAAGCATCAGAAATATATAAGAAAA
AGATTATTTTCTTAATTGCTTTACTAAAAACACCTCTATGATTTTTCAGTAAAACTTGATTCTTATGTCATGTGTGA
GTGTGATCTGCCTCTCTTGGGATACTACTGTACTCATGAGGAGTGATTTTTTTCTCCAACGACCTCTTTGTCACGTC
AACAGGTCACAGGAATAGTGTACCCTAAAAAGCCACCTGCCACATGCTGCTGAAAATGTAAAAGTACACACATACAC
ACACACACACACACACACACACACACACACACACACCAAAATCAGGTATCACAAGCTGAAAATAAAATTGAGTCCAA
TTTTTTTTTAATTGAGCAGTTAATGTCCTTAAAACAAAATCCTATACTGCAACAAATACTTAGCCAGATCATTCTGA
TACCTCCAAACTGTGGTGTATTCCAAGATACCTCTATGATCTTTGATTTGATCCACAGCTTTTCAGTTATCATGCAA
ATACCTTCAAGTTTTATCTCATTTCTCAGTGCAAACTCATTAAAAATTTTCAGCTGAATTCAATTTTATAAACATGT
TGTGAATGTCCTCTTTATATAAGCAAGGTTGTAAGGAACTGGCCACATAAACAGAAAATTGAATAACATATGGTTTC
TGGCCTTAGTGATCTCATGTGTGAGTTAGGCATATGGGCAAAATCAGAACACTATAGAGTATAAGTCTAAAATGGTA
GTATTTTATAATAGAGGATGAAGAGGGTGCTGTGGGATCATAGGTGACAGATATAACTCCCGTTGTGGGACTTGAGA
AAGGCTTCACAGTCTGGAAACATTTAGTTGCTATTGAACACAAAATAAGACTCACTGTTGAGAGAAGGGAGAGGGAG
GGCATTTCAATCAAATTAAGATTCTGTGGCATATTCGGAAACTGATGTTTTTAAAAAGAGTAATGTTTATTACATTC
CTCTACATAAATTATATTTCTATGTAATATGAATGACAAATATTTAACACAAAATGCCTTATAACATTTGAATGAAA
TCCATCATATGACCTGTTATCTATTTCCATTTCCTTTTTGCTCATATCATTATGAACAATGACCTGATAAATTTTTT
ATAAGACTTTGCTGAATTAGTAAAGGATTATTAAGTTTAGAATGAACAAAGCTGACCAATCATTCAGGCAAATTTGA
CCGTTTTGTTGTCGCTTTTCTTATTTCTGAAACCATACAATTCCCTGAAATGAATAAGTACATATTTGATAACTTCC
TAAATTAAGGCTCAAAACACTGGTAATCTACTGGGCTTTCATTTGTTCCTTCTATTTGTCTAATCCTATCTATATTT
CTTTATATGAGCTATGAAAATATTAGATTTATTAAGTTGTCCTTTATCTTAATAGAGAAGAATGTTTTTCTATGACA
TTAAGAGGAATTTGATTTTTTTCTTTAATGATCTACTTTTAATTTTGGTAGAGTAGCATTGATAAGATCAATATTAC
ACATTGTTAAGTATGCATTACATGTTGATAAGATAAATATTACACTTAAAATATGTTTATCAAATGTATGAATGATA
AAAACGAATTCTGAAATGTATGGGAAAGATCTTGAATAAAGGTCTATGTACATTTCAAGGATGTCTACATATGCAAA
TTATCATAATATAATAACTATTGAATATGATTATCTTCACATACTTTCTTTATTTTTCATCTCTTAGATGAAATTGG
GTATTGTTTTCTTATAGCTGGAACAAAGCATTACAGAGAATTCTTAGTGTGATTTCATTGAAACTCACTGTTATATG
AGTTCAACAAAGTTTAAATTAGTCCATGACTTAATCATCCTTTATAAATCCTATCACTAGTATTCGGTAAGGACAAA
GTCAATTAAAAAATTAGCAACAGAAGCATTAAAAGAAGGATTAATAAATACAAAATAAGGGATGTGATATCTTTACG
TATTGCTGAGATGTTAGTGCTAAGGAAAAACTTCCCTGTTCATAATGTGAGGTGGGAAAAAGAAGAACTATTATTGT
ATATTTCTCCTCTCTAAAACTGCCTATCTGACTGTGTTTTTCTGTGTCAGCCGTATTAACAGATGTTTAATTTTACT
CACTTTAGTATATAAGGCATCATAATGTATGAACTATTTCAAAGGCCCTATGATGGCTAATTAAATAAAAATATATT
AAATATTAGCTGGACAAAATAAAATATGTATTAATTTTGGAAAAAGTAGATCAAGGTTTTGCAGATCTTTTCATATC
AATATATTCATTTGCTGAATAAGCTTTTATTGTTTACCAATATTACTAGTTTTATAGAGATGTAGATATCACCACAG
TATGACTAATTTTATAGGGACACAGATAGATAGATGTTATTTTATTCCAATCTTATTTTTACATATAACAGGTATAA
ATATGCGCTTGAAAGGAGTATATCACTTAGGAGTCAGTCAGAAAAGTAAAGATCTTCTAGTCTAATACAGTGGTTCT
CAGCCAGGGGTGATTCTGCTGCACGCTGAGGGATAAATTGGCAATTTCTGGAGACATTTTTGGTTGTGACAATTGCA
GGAGTGTTACTGGTATTCATTTGGTAGAGACAGAGATATTGGTAGACACTGTACAGGACACAGGAAAGTCTCTTACA
ACAAAGAATTATTCTGTCCAAAATGTCAGTTGTGGTGAGGTTGGGAAACACTGGTCTGGAAGAAGGAATTTACTATG
AGGAACTAGTTACGAAAGTATAGAGACATTTAACAAGCTGAACAAAGGATAGTGAGATGGCTCAGAGATTAGCAACT
GTGGCATGAAGCCACTACTACGTTTAGGTAAAAATAAGCTACCATTTATTCTTATAGTAATAATAATAATAATTATT
ATTATTATTATTTGAGATGGAGTTTCGCTCTGTTGCCCGGGTTGGAGTACAATGGTACAATCTCGACTCACTTCAAC
CTCTGCCTCCCAGATTCAAGCGATTCTCCTGCCTCAGCCTCCTGAATAGCTGGGATTACAGGTGTGCACCACCCCTC
CCAGTTAATTTTTTGTATTTTTGGTAGAAACGGGGTTTCACCATGTTGGTCAGGCTGGTCTCGAACTCCTGACCTCA
GATGATCCATCCACCTCAGCCTCCCAAAGTGCTGGGATTACAGGCATGAGCCACCACACCTGGCCCACTCTTTCTTT
TTTAATTATTGAGAAATATAAAAATATGTCAAAAGTAACAGGTGTGGTGGAGTTACAGCATGCACATAATGGGATAC
AGCCCATTATCTAATCTCAGATGGAAACTAGAAAAAAAAGAGAAGATCTTTGCTAAAGCACAGATTATGTGGAAAAT
CATTTAGAAAAATAGCTTATCACAACATTAAAATTAAATCCTTTAGCTGATCATTTTTCCTTGCTATTTTTTCTTTT
AAAATTGAGAAGACAGTGAGTTTTTTTTCTTTATTGTCATTATCTTGATGTCAAAAAATAATATGCACATTATAAGT
GGGAAAAAAGATAAGTCGAAATGAAATGAAACAATGCGAGGAAAAAAATGTCACAACACTCTTCAATTAGAAAAAAT
GACCCCCATCTTTCCTCCAAATAGAAATGACGTAACTGAAGTAGTGGAACTTTCTCTTCCATGGCAACTCTAGAGAA
GGGGTAGATGGCATGGGATTGTGGACAGATGGACACAGAAAGAGGCCTCATTTATTGTTATTGTTAAAACTTTTACT
TCTAGTAATAGTGACACCTCCTTCAGCATTTCTTTATCAATTGTCAATATTTTTTGGATCACCAGCATCACCTTCTA
TATGTATGTCTAGAAACCTCCTGTTATGAATTTACACTTCTCAGAGTCAAGACAGAAATGCTGTGAATTGGGCGATA
AATAAAATACCCCCCTTTTATTGCCTTGCTTTGTCTCTTAAAGAAAGATGCCTGTTGGGGGACTATGAGAATGCTTT
GTGCTTCTGGACCTCAAGGGACAAATCTATAATAAAAATTATGCATAGTGATGAGAAATATATATAATGCAAGTTTG
TAGAGATCAGTTAACTTATCTTGTCTAGGCAATTATTTCTAAACAATGATTTCAAATCATTAACTATAATATAGCCC
ATTCATACCCTCCATTTTTGTCAAATCCCTGTCACCTTCAAGGACTTGGCCATCCCATAGGCTGCTCTGCTTTTAAT
AGAGGAAGATGCTGTAACTCTTGGTACCATTGCCAGTTATGAATTTATCCATTAATGAACATTGCATTTAAGGCATA
GGTTTATCTCCTTCTCCAGGTATGAACCTGCAGGATTCCTACCTGAAGCTTAAGGGAGAATAAATCCACCTGGGACA
ATCAAGGACAGATCAACCAATCAGCTCAAAGCAGGTGTGAATTACACAGTTTATTTGAGTGACAAGGTAGCTAAAGC
AGGGATAATAAAAGAAGGGAGTGGGTTGATGTGGACAGACGAACTATGGCTTTAGGAAATTTGGTAGGGACTGAAAC
ATATTTTGTGTAATTTATGTGGGTCTAATAGCTTTTGAAACTTGTTTACAAGACCTGTGTAAGTGGTACTGGCATAT
TCATGCATGAGAAAACATCAAGGGAAAACTTAATAGTTCAAGGAGGTGACAAAGAAGAGAGGAACCAATTATTTTCA
CTAGCCGTCAAAAGCAAGAAAATAATCAGCTTGAGCCCTTCGGGGAAAAGATAGGTTAAATATTAAGTAACAGTTTG
TTATTATTCCAAGTGTTTTCTTAAAGTTGCTCCCATACTTTCCTGTTTTCTCTGAGGGAATTTAGTTTTTTTGTTGG
TTTTTTTTTTTTTTTTTTTATAACTGTCATTGGTCAGAGCTTGATTTGATGCCAGTCAAATTTTTTTAAAGAGATTA
TGAAAACTGCTTAAACTCTTCCAAAGGGAAGATGGGTCATTCTTAACATGTGTTTCAAGAGGAAGAGCATAAGAGCA
TTATATGGTAAGGCTGAAAGCAGATATCAGCGTTTAGGGGCCATGAAGAGGTAGAGCTCACATTGGTAGGATCATTG
ACTAGAATTCCAGAGATCAAAATTGTATGTTAGTCTAGCATTGGGGAGGACTTGTAGCTAGTATCTTCATTCTAGCT
TGGGAGCCTAGGAATCAGGTTAGGCATCTTGCACAGGAATGGGCCGATGGGCTAAAATCTCCTTGAGAGAGATGATT
AATCCAGGACAAACCAAGCAGTCATGCCAATGAATTACTTTAACAGGGTACTTCATATCCTCATCCTTTGGGCAGCA
CGGTCTTCAGAGATGGGGCAGGCCCCAGGCTGCAGTTGAGATTCTATAAACTAAGGTCAAAAAGATGCAGCAGTGAA
GAAGTCATGCTTATCTTGTATAAATCATGTTTTCTTTTCTTTTTAATGAAAATGTACATTTAACACATTTTAAAACT
AAATATTGACCCTAAAATTCCAACCAAAAAATGCTACATAAGTGGTATTTATTTTTGAATTTCCCTCATGCTCCTCC
CACTGTGGGGACAAGGAGTGGTGGTGGAAGAGAGATCTTTTAGCAAACCTGTGAGTAGAGAATTAGAAGGTAATGGG
AGGAAGGTAAAAGGAAAACATCATAGATGGATAGGCTCACAAACATTAAAGGCCTTCGTGCCTGTCCTTCATGCCTA
TTCATCCCTCTCCAGTATGTGAATCAATGTACTTGTTAAATATTCATTCACCTCACATATTTAGCATTAACCGTGTA
TCAGGGACGTTGTTAGACCGTTGGTTTACGATGATGTGTAAAATATCATTTGTAACTCAGACTAACTGGAAGTGCTC
AATATAATAAGATGTAATGTTATGGAACACTAAGTCTGTGCTGAAGACTTATCTCCTTTAATCCTAAAACAATCCTG
GTGGGTAGTCTCAATGATCATCTCCAAGTCACAGTTGAGGAAATTAAGGCTTCAAGAAGTTAAGAAACTGGACCAAC
ATCACAAAGGTAGCATCAGAGTGACAGTTTGATTTCAAAGTGTACTTGACTTCAAGGCCCACATTTCCTTGCACGTT
TAATATTGCCTTTCTCAGGTAAATATACCATTAAATGTGATACAACTCTAAGCATTTGAATTACTTACAACGTGCAG
AGTTAAAACCAGCATTATTTACACTATACTTCAGCTCGTTTATAAGTGAACTATTATTTTGTGGACTAACCTATGAA
ATGTAACCACATTGAATTCCTCTGTTAGGTACAGGTTTGGTGATTCCAGGGAATAGAGTATGACTGAATGCACAGGT
AGGGGTGAAGTGAACCCGGTCAGAAAATTTAGAGAGCATCGAGCAGATCATTAAGCAGCTGTCTTTCAAATGTGCAG
AACACAACTCATTTGTAATCTAGGGACTATCTGTATTGATTCTTCCCAGGGAAGTTACTTATTTTTATACATATGTG
GTGTGTTCTGTCCATAATACCATTCTACATGGTAATGCTCAACTTTATTATTTAAAAAAACTGCTAATAATGAGGTT
TTTCTTTGTATCACAGAAGCAGCAGGAGCAAGTTTTCTTTTTCCTTCCCAGTTTTTTTAAGTACTGCCAAGGAATGT
GATTTTGTCAGACTTGTATTTCCTATTAAGCCAATCTGCATGACTGTTCCTTCTACTAGCTTTACCTGTTCACTCAT
TTATTAATTCATCAAATATTTGTAGAGTGACTATTGTGTGCCACATACTAATATAGGCACAAGGATAACCAAAAACA
GACAAACGCTGTCCTTTCAAGGAGCTCATATAGTAATGGGAAGTTAGGAAAGGAGAAAATAAATATGTGGTATTTCA
AATGGAAGTATTAAAGTGTTAAGAAGAAAAGAGAAACTAACAAGATAGGGAAAAAGTGACAGGAACATGATGTTTTA
TTTTTTATTTATATATATTTTTTGAGACAGGGTCTCATTCTGTTGCCTAAGCTGGTGTGCAGTGACGTGATCATGGC
TCACTGCAGCCTTGACCTCCCTGGGCTCAGATGATCCTCCCACATCAGCCTCCCAAGTAGCCAGGTCTACAGGCATG
TACCACGATACCCAGCTAACACGTTTTCTTTTCTTATAGAGACAGAGTCTCACTGTGTTGCCCAGGCTGTTCTTGAA
CTCCGGGGCTCAAGCAGTCCACCCACATCTACCTCCTAAGGTGCTGGAATTACAGGCATGAACCACCATGCCCAGCC
GAAATTGATGTTTTATATATGGCAGTCTGGGCAGACCTCTTTGATGTGATATTTGAACAGAAATCTCAAGAGAGGGA
GTGTATTAGCCCGTTTTCATACCGCTAGAAAGAACTGCCCGAGATTGGGTAATTTATAAAGGAAAGAGGTTTAATTG
ACTCACAGTTCAATATGGCTGGGGAGGCCTCAGGAAACTTAAAATCATGGCAGAAAATGAAGGGGAAGCGAGGCACC
TTCTTCACAAGGTGGCAGGAAGGAGAAGTACTGAGGAAAGGGGGAAGAGACCCTTATAAAACCATCAGATTTTGGGA
GAATTCACTCACTATCATGAGAACAGCATGGGGGAAGCCAACCCCATGATTCAATTACCTCCACATAGCCTCTCCTT
TGACACCTGGGGATTATGGGGATTATAAGGATTACAATTCAAGATGAGATTTGGGTGGGGACACAAAGCCCAAACAT
ATCATTTTGCTCCTGGCCCCTCCCAAATCTCATGTCCCTTTCACATTTCAAAACCAATCATGCCTTGACAACAGTAC
TCCAAAGTATTAATTCATTTCAGCATTAACCCAAAAGTCCAAGTCCAAAGTCTCATCTGAGACAAGGCAAGTCTGTT
CTGCCTGTGAGCCTGTAAAATCAAAAGCAAGTTAGTTACTTCCTAGATAAAATGGAAGCACAGGCACTGGGTAAATA
TACCCATTACAAATGGGAGAAATTAGCCAAAATGAAGGGGCTACAGGCCCCAAGCCAGTCCAAAATCTATCAGGGCA
GTCAAATCTTACAGCTCTGAAGTTGTCTCCTTTGACTCCATTTCTCACATCCAGGTAACACTGATGCAAGAGGTGGG
TTCCCATGGTCTTGGTAAGCTCCACCCCTGTGGGTTTGCAGGGTAGAGCCCCTCTCCTGGCTGCTTTTACAGGCTGG
CATTGAGTGTCTGCAGCTTTTCCAGGCACGTGGTGCAAGCTGTTGATCGCTCTACCATTGTGGGGTCTGGTGGACAG
TGGCCCTCTTCTCATAGCTCCGCTAGGCAGTGCCCCAGTGGGGACTCTGTGTTGGGGCTCCAACCCCACATTTCCCT
TCCACACTGTCCTAGCCGAGGTTCTCCATGAGGTCTTCATTCCTGCAGCAGACTTCTGCCTGGACATCCAGGAGTTT
CCATACATCCTCTGAAATCTAGGCAGAGGTTCCCAAACTTCAATTCTTGAATTCTGTGTATCCACAGACTCAACACC
ACGTGGCAGTTGCCAAAGCTTGGGACTTGCTCCCTCTGAAGCAATGGTCCGAACTGTACCTTGGCCCCTTTTATCCA
TGGCTGGAGTGGCTGGGACACAAGGCACCAAGTCCTGATGCCGCACACAGTGGTGGGGTTGGGGGGGGGACCTGGTC
CACGAAACCATTTTTGCCTCCTAGACCTCTGGGTCTGTGATGGGAGGAGCCGCAATGAAGGTCTCTGACTTGCCCTG
GAGACATTTTCCCCATTGTCTTGCCTATTAACATTGGGCTCCTTGTTAAATATGCAAATTTCTACAGCCAGCCTCTC
CAGAAAATGGGTTTTTCTTTTCTACTGCATTGTCAGGTTGCAAATTTTTCAAACTTTTATGCTCTGTGACCTCTTGA
ATGCTTTGCTGCTTAGAAATTTCTTCTGTCAGATACCTTAAATCATCTCTCAAGTTCAAAGTTCCACAGATCTCTAG
GTCAGGGTCAAAATGATGCCAGTCTCTTTGTTAGTCATAGCAAGAATGACCTTTACTCCAGTTACCAATAAGTTCTT
CATCTCCATCTGAGACCACCTCTGCCTGGACTTCAGTGTTCGTATCACTATCAGCATTTTGGTCAAAACCATTCAAC
AAGTCTCTAGGAAGTTCCAAACTTTTCCACATTTTCCTGTCTTCTTCTGAGCCTCCTAACTGTTCCAACCCCTGCCT
ATTACCCAGTTCTAAAGTTGCTTCCACATTTTCAAGTATCTTTATAGCAGTACCTCACTACCTCAGTACCACTGGTC
TTAACTCCTGCGCTCAAGCGATCTGCTTGCCTCCACCCCTAAAGTGCTGAAATTACAGACATGGTCCATTGTGCCGA
GCCAAAATTGATATTTTATGTATGACACTCTGGGCAGACCTCTATGAGGTGACATTTGAACAGAAATCTCAAGGAAG
GGGAGAAATTATCCATTTACATATTTGGGGAAAGAGCATTCCAGGTAGAAGAAACAGAAAATCCGTAGTCTTGAGGA
ATGCCGTGTATATGCAGTATTTTTCAAACTTGTTATTTTGAAATACATATACACTTACAGGAAGTTGCAAAAGTATT
AAGAAAGATCATGAGTACCCTTCACTCATCTTCAGCTAATGGTTACATCTTACATAATTATATGTAATATCAAAGCC
AGGAAACCAGGAAATTGATGTTGATACAATCTATGCTTTATTCAGATCTCACATCTTACATAGCTATGCACAATATA
AAAACCAGGAAATTGATATTAACACAATCTATGCCTTATTCAGATCTCACCAGCTTTTACATGCACTTATCTGTGTC
TGTCATTCTATGCAATTTTATACCATGTTTAGAGTCATATAACAACTACCCCTATTTTGATACATGGTACTGAATAG
TTCCAGCGTCACAAAGGAACTATCTCAAGCCACCCTTTAATTGTCACACCCATCCAATCTCCCATTCTACTTCCTGA
ATCACTAGCAACCCCTAATCTGTTCTCCATCTCTATGATTTTGTCTTTTCAAGGGAGTTTTCTAAGTAAACTCATTT
GGGGAAAGAAAGGAGATGAATTGTTCTAGCCACGGAGTGGAGAACAGAGAGTAAGAGTACCTATTGAAGCAGAGGGA
GTCATTGCAATAATTCAAATGAGAAATAATGGTGATTCTAAACCAGGAAGCTTTCAGTGAAAACAATGAGAGGTACA
TGGATTCTGGGTATTTTTGGAAGGTAGCACTACCAGGTTTGCTGATGAATGGGGTATGGGGTGGGAAAGAAAGAGAA
GAGCCCAGGATGAGTCCAAGGTGGATAAGGTGAATAGAATTGAGAAAATGGTAGAAGGATCAAGTTAGATGGTAGAG
GGGTAAAGGTGGAAGCAATAATTTTGTTTTGGAATTGTTAGGTTTGAAATCTTGTTAGACATCCCAGTAAAGTCACA
AAGAGTGCAGTTGGATGAAAGTATGGGATTCAGGGAAGAAGTATGTGCTAGAGATGCAGATTTGAGAGTCATCTGTG
TGGAGGTATTATTCAAATTCAAGTCCCCTTGGAATGAATGGCTATTCAGGCAGGGTCTTCATAAAAATGCTTGTTGC
ATGCCTGTAATCCCAGCACTTTGGGAGTCTGAGGTGGGTGGAACACTTGAGGTCAGGAGTTTGAGACCAGCCTGATC
AACTTGGTGAACCCCCATCTCTACTAAAAATACAAAAAAAAAAAAAGTTAGCTGGGCGTTGTGGCACATGCCTGTAA
TCCCAGGTACTTGGGAGGCTGAGGCAGGAGAATTGAGCCAAGATTGTGCCATTGCATTCCAGCCTGGGCAACAAGAG
CAAAACTCCGCCTCAAAAAAAAAAAAAAAAAAAAAAAAAAGCTTGTTGCTTCAAATTCATGTCAGTCTGTAAAATTA
TCTGGGAAGGCAGTACAAAAACTGTCACTTTGACTACGATGTTTCTGGTGACCCATCTTCATTGATCAGTATGGAAA
AGGCATGTCTCTGAAAATCTCTGAGAGTCTTTGATACAGCAAGAACATAAGGATAAATCATTCTTCTATGTTCATGG
TTGTAGAGGATCTTGAATGTTTAATGGCAGAATAGCCAGATCACACTCTGGCACTTCTGTATGAGAGGCTGAGGGAT
GTTACTGATTCACCCCGAGAAATATTTACTACTAAGGGGACAGAGGCAAAGGGGATACAAGACTTCACCCTGAGCTG
TAGCGCTCCCTCCTTCCCTATCCTGCTTTCATTCTTCACATTGTTTTCCTTCTTTCTTTTTTATTATTATACTTTAA
GTTCTGGGATACACGTGCAGAATGTACAGGTTTGTTACATAGGTATACATTTGCCACGGTGGTTTGCTGCACCCATC
AACCCGTCATCTAGGTTTTAAGCCCCACATGCATTAGGTATTTGTCCTAATGCTCTCCCTCACCTTTTCCCTGTGTC
CACATTGTTTTCTTTCTTTTTGAAGCCTCTCATTCACTAGGTTTCAATCCTGCCTTGCTAGTGTTCTAACTCTAAGG
CCTAGGCAAGTTATTTCACCGAACTTAGCCTCAGTGTCCTCATCTGCAAAATGGATAGTTTTATGATATCTTCAGCC
CTTAAAGTCAATGGTTCTGACAGCTAGGGTGTACTATCTTCTTGGATATCAGTCATCTCAAGCAAGCCCTCCTTTTT
TGGACCTTCTTTTCACACACTTCACATACCTTAGAGAACATAATACACATCCTCTTTACTCAGGGCTTATTCTTTAT
AACAGGCTTCCTAATTCAATTAACTCAACTTTTCAAAAATATTAGTGACTACTGTGATGTAAATAAATTTGCATTTT
ATAGGGGTCTTAGTAACCCAGAAGGGAGTGGGGAAAATTAATATATATTGAGAGTTTATTAAGTGCTAGGTACTGTA
AATATTTTCTTGTATTTAATCCTCCGAGTAATTCTACAACAAAGATATTATCATTGCTATTATGTAAATAAAAGAAC
AAAGTAGAAAGAAACCCACGGTCTTGTATAAGCTCCCCTAGTTGGTGGGTATTGAAGGGAGTATTTCAATCTTTGGT
AGCTTCTGAGTTTTTGTTCTCTCAGGGAATCTGCCAGATGTCCAGGGCACCTGCCAAACCCTATGAGGCTATAAGAA
AACCATTAAGGGTCTTAGATTACCCAGCTTTTTGGGAGTTAGAATTCTGAATGAAATTTAGTGTTCCTGCAGCTACA
AAGGAATTGAGTTAGGGAAGTGATGACTTTATCTTTAGCTACATTGGTTATTTTCCTTATAATAATCCTGGCTTGGT
AGATTAGAGGCAGCCCGAGTAACCCAGAATCGCTAAAATAGAAGTGCGAGCTCATTGCCCGCTGTCCTTCACTATGT
TTGCATATAGGAAGCAAGAATAAAACAAGCATAAAATAGGCTAACTAGCTTGTCAGAGCTCTTCACACCAAGTCTTT
GTGAGTTCCAATAAGACACTGACTATTATTAAAAAGACAGAGACTCCACATAAGTAGGAATTTATTGTTTTCCTTTT
CAGTCACCAAAGGACAATCCTCTGCATAGGTTAGCAAAAAATGGTACTGATCCTATAATCTCTAATATTAAAGTTTA
GATTTGGCAAGCTGTACATCTTATGTTGTTCATTAACAAAAAACAATATTGATTGGTATCTTGTACTATAACTTGTA
CTGTGGGTCAAATTCCAATACAGCAAATACCATTGCAATAACAATTCTACAAAACTACATCAAAAAAACCTTTCATG
TTTGAGCCAACAGCCTGATAGTGCTAAGGACTTTGAGTACAGTATGCTAGAAGATTCTTAACAGTTATTTGTCCTGG
ACAACAAAGGTTGACTCCATTAAAAACATAGCCATCAGTGTGGGATTATTTCCAAATCAAGCTTTTGGAAAAGTCAA
ATGAAAGTTTGCAAGCAGGTGGGGCATGGTGGTTCATGCCTGTAATCTCAGCACTTTGGGATGCTGAGGCAGGCGGA
TCACCTGAGGTCAGGAGTTCGAGACCAGCCTGGCCAACGTGGTAAAACCCCCATCTCTACTAAAAATACAAAAATTA
GCTGGCTTTTGTGGTGCATGCTTGTAATCCCAGCTACTCAGGAGCCTGAGGCACGAGAATCACTTGAACTCGGGAGG
CAGAGGTTGCAGTGAGCCGGGATCATGCCACTGCACTCCAGCCCACATGACAGAGTGAGACCCTGTCTTCAAAAAAG
CAAAAAACAAACACGCAAACAAAAAAAAAAAAAACCAAAGTTGGAATGCAATAAATGTTCATTGAATGAATACTGAA
TAGGGAGTTTCAGCTAATCCACTCAAAATAGTGCTGAATTTCCAGCTCTAAGGTCAATGCTTGGCATATATATCCTG
AAGGAATGAATGGACACAGAGTAATTTTTTTTCTAAAATGCAAATTCAATTATGTCACTTCCCTTCTTAAAATCCTT
CAGTAGCTTCCCGTAGCCTCCAGCATATTATTTTGAATAGTGCTTCTCAAACTTTGATGTGCATCAGAATCACCTGG
GGATTTTCTTAATTAACTGATGCTGATTCAGTAGGTCTGGGGTATTGTCTGAGATTCTGCATTTCTAGCAAGTGCTC
AGGGTTATAGCAATGATTTTGGCCTGCAGACCATACTTTGGGTAGCAAAGACATAAGCCACTTAACTTGACATAAAA
GACTGTTTAGACCCTTAGTTTCTCTCTCGCTCTTTCCCCATTTTGAGCTTTTGCTCCGGTTCATGTTTTTCCCTGAA
AATACCGTGATCTTACATTGTCTGTCTGGATGCTGAATTTTCCCTAATTCTGGGCCTCCATGTAGTTTTAGGTTTGA
CATCACAACCACCAAAAGATTTCCCCTTCTCCCTTAATCTTGGTTAATGTCACTCTCATGTATTATACTGTTAATGA
AGCATTGAGGACATAAAACTTATCAAATATTTTATCACAATCAATGATGGCACCAGTGATAACATCCAAATGCCTGG
GTGAGTAAATAAGAGGAGAATAGGGGACTTGTTGTTAAACTAAGTTTGCAGAGAAAAAATGTACTGATTATAATTAA
ATTGGATGTTTATTTGTTATGACAAAAAAGGAGCTAGAGTCTTTTAATCCACCCCTTGGCACCACTGCTTATCTCCT
TGTAACATACGTTTGATTCCCATGTCTATTTCTTCCATATGGGAAATTTCAGCTCCCTAAACATCACCAATACAACC
TGTTGATAAGACAAAGTTAAATTTATTGCTTACTATGGTAAGAAAGACCACAGCCTGGACAAAGCTTTGGTAGTATT
TCATAAGGAGAAAGGTGAGGTTGGATTTCATTGGGAGTATGAAGCTTGGTTTAAGATTGGTCTTTCACTGTGGGGGC
ACAATTAGGATTGGGTAAGGATCATGGTATTACAACTTAGTTTGGTGGAAACAGCACAGTGAAGATTTCTAGCCAAG
AGGCTCAGAGACTATTAAGGTGTGAACTCTATTGATGTTTTTTGTTGAAGAGTTGATGGGAGTTTGGGGAAGTTACT
TTAGTGAACAGTCAAATTATTTGCCTGGCCAAGAGTTATCTGTAATAGGAAAGTTATGCTAATGAAGACAATGGAAA
GGTAAACCATGTTAATGTCGACAGCCAGCTATGTGAGCATAAGGGGTAGGTAGCTTTGGTCCTCCATGTCCAAACTG
TTTGTAGTGGTAAGTGATCTTCATTCTCACATAGATTGAAAGCTTCCTGAGGACAGGGCAATGTCTTTGTAAACTTT
AAAATATCTATGTCCTGCACATCACCTGCCGTAGACAAGCATCTAGTAATTGACGGTTGGGTAGATACTGAGGGAAA
ACATGCACCAAATAAAAATGGCAATAGGACACAAATTCACTATCATTTGGAAGAATAACAGTGTTTTCCACTGATAT
TTGCTACACACAGTGGGGTCCACAGAGCAGCAGTACCACTTGGGAGCTTATTGGAAATGGAGACTCTCAGGCACCAC
CGCAGGTCCAATGAATTAAACTCTGCTTTTTTTAAGGTCATTTGTATTCAATTATTATTTTTTTCTTTTTTCTTTAC
TTTCGATGCATTTTTCTTTATTTGTTTTTGAGATGGGGTCTTGCTATTTTGCCGAGTCTGGTCACAAACTCCTGAGC
TCAAATGATCCTCCCACCTCAGCCTCCTAAGTAGCTGGGATCACAGATGTGAGCCACCACACCTGGCTTGTATCACA
TTAAATTTTGAGGAGCAGTGCTTTAATATCTATTCCATTCTCATCACTTGATGAGGTATTATTAATTCCACTTATGG
ATGTGGAAGTTGAAGCCAGAAAGTTTAAATGACTTGTACAAGGTCAAACAGCTTACAGGTAGTTGAGCCAAGAGGCT
CTCAAGTCTTCTGCCTCCACAAACCCCTGTTCAGCTGCTGCCCTACAATGGAATAAAATATACTAATCCCAGAGGGA
CAAATATGCTAAAAATCTCAATATTATACACTTTGGAAGGTGCAGGTGCATTATCTTTCAATTCTAATTTCTCTTTC
AAGTTTTCTGATGCATAAAAATATGAACAGCAGGTCTGAGCAATGTTTAGATGCCGTGCTTTGATCCTTTTGCCATT
CAAGATGTTTGATTTGCATTCTGCCAAGGAATGTCTGGTAACCTCCATGATGCAGACCACACCATTAGTCAAGAGAG
AGCTGACGTACCTTCATCTGAGAGCTGGCTGGCTGTGAGCTGCTCAGAGGGAAAGGATTTCTATTTACAAATTGTAT
CGATTATTTATAAATAAAAGTTCCCCTTGCTTTCTTCAGTTGTAAAATCTGCAGTTAGAGAGTCGGGAAGAAGATCA
AAACTGCATACATTTGCATCTGCCAAGCCTGATAACTAGTTCCAGAATTACAGAAATGGTGCTGAAATAGCACCTCA
AGTACCAGGCTCTATCAAATTTAATCTATCCATAAGGCAACTGCCAATTATATTTTAGAGAAAAAATGTAGACTGAA
AAGATAGACAATCCAAGTAGCAACTCCTGTAAAATTATATGCCCATAGGAGCAATCTTGAAGATATAAATATTGGTA
TGTTTCTCCTTCATTTATCATTTATCTGATCATTTGACAAGTATTTATTGAATGCCTGTTAAGGGTGTAGATATATG
TGGTGAGGCTGCAGGTGTAAGTAGGTCTTTCTGAGGATATGCATGAAGTTGATGTTCATAACTTGGAGATGTGTGTA
TACAGACTGAGGATTCCTTCAGTGGATATTAAGAAGTGGAGTAATAGGCAGTAAAGAATACACTAGTCAGTTGTGGT
ACATAAACACGTCAGCACCACTTAGGTATTAACTTCCTGTTTTGTTTTGTGTGTGCTTAATTACGCTGTTTATTAAA
CAAGCACATCATAATCTGCAGATATTGTCATAAACAGCACAATAAAGCCTGCCACATCAGAATGTCATCTATCAAAT
TAGGTGTGTTCCTCAGCTGTCCCGATAGGCACACACCTGTGCCTGTAAATAGGCGCTTGGCGGAGATTGCTTCCAGG
TGTGGATCTGTTGGGCGACCTTGGGATGTAGGGCACTTTGGAACCTTTTCCTCTAGCTTCAGGAATTAACCTCTGGG
CTTGGTTCCATGCCAGCTTGCATTTTGCTTTGGGACAGTAACATGTAAAGAATATGCCTGTGAATTTAGGGTTACTG
AGAAGTCCTCATAGAAGAAGTAAAATTTCCTTGAGGAATGGGAGTCTTTTATTCAATCCAGGTTTAATGCAAGGCTT
GGTGAACAGCTCCAGAAGGTTAATAATTGCGTGCGTGTGTGTGTGTGTGTGTGTGTGTGTGTGTGTGTGTATCCTTT
TGTCATTCAAAAGTATACGTATACACACACACCTGTACAGCTGATGATAAATATACATTGTATCAATGAGTTCAAAT
GAAGTGTGCTATTCATTCACTGAGGAATGGGCTATTATAATGAACTATTATGATATTAGAAATTGTCAGGGCAATAA
GCAAATAATACATACGGTTTTCAACAAACTTTCTAAGTATTGTTATCAGTGGGTTTGCTTAAATCTTTTTTTACAAA
TTTATTTATTTTTTTGAGACGAAGTCTCGCTCTGTCGCCAGGCTGGAGTGCAGTGGTGCAATCTCGGCTCACTGCAA
CCACTGCCTCCCGGGTTCAAAAGATTCTCCTACCTCAGCCTCCCGAGTAGCTGAGATTACAGGTGTGCGTCACCATG
CCCATCTAATTTTTGTATTTTTAGTAGAGACGGGTTTTCACCATGTTGGCCAGGACAGTCTCGATCTCTTGACCTTG
TGATCCATCTGCCTCAGCCTCCCAAAGTGCTGGGTTTACAGGCGTGAGCCACCGTGCCCAGGCAATAGCCCCATTGC
TCAGTGAATGAATAGCACACTTTATTTTAACTCATTGATATAATGTATATTTATCATCAGCTATACAGGTGTGTGTG
TGTGTGTGTGTGTGTGTGTGTGTGTGTGTGTGTGTTGAATGACAAAAGGATACACACACACACTCTTATTAACCCTC
TGGAGCTGTTCAGCAAACCTTGCATTTTTTACTTTCATTACAGTGTGTAAATAATTTAGCAAATTCTAATTTGAACC
TGATATCAATTGAGCATTTAATATTTAGCCAAATATTTATCAAGTGCTGACTGTGTTCTAGATGCTGGGGCTGCAAT
TTCGAAACAGACCATTGAGGCCCTCATGGAGCTCACAATAAATGATCTTCCTTAAAGTATCAGGTCTCTGGTTTGTT
ACCGTATTTTTTAAATTGTTAAGGAAAGAAAAAGGCCCTATCTTTTTGTAGACAAACATGCCCTAAGTGCTTCCAGA
AATAATCTCCATCAGGTAATGCAGACTGTGTGTGGAGTGAAATTGAGTCCAATCCATGATCCAGCAGAGTTTCAGCC
CAGGATTTCTTTAGAGCCTTTGCTACACACAAAGTTGGCTGATGTGCCATTCAGCATCCCAGCAGCTCTTTCTCTTC
ACACTAGCAATGGCAAAGCTTTGTGCGGAGGCATTGCTGGCTGCTCTGAACTAAAAGCATCCGTGGGGACCGAAAGA
GGTTTTTGCACACCTTATTAAGGTAGGCAAGTGTGTCTGAGTGTGTGTGTGCCTAAAAGCTGGAAGACATCTGTTGA
GAGGAAAGTGCTCTTCTGTGGGTCTGGCAGCTTTTCTGTAAGTCTTCTATTCTGATGCAGGAGCGTGTGAGCAGTGG
GTGGGAGGAGATGCTTTGGTACTTGGAATGCTGAGGTCCGGATTAAGTGGTATTGTAATAGCTAGTTAGAGGCAGAA
TAAAAAGCTGGGAATCAAAGCATTTAAAAATGCATCCTTCCATTATTTGCTCTCAAGTTAAACCATATTCATTCTAG
GGGAAATTAAAAAAAAAAAAAAAACACAGCAAGGGCAAGTAGCCCAAATCTGTAAGGTCTTTGAGCTTCTCTGTTCG
TCCAGCTTTTGAAGTCTTCCTACAGCCAATTTGTTTGGCTCCTCTGGAGGGGGCAATTCATATCCACTTCCCTCTCC
TGGAGCATTTCTTTCTTCTATACTCCATCAGGGAACAATAGAGTTTAACAGTAACAGGCAATTTTTTTTTTTTTTCA
AAGCTTGTGCCCTCTTCTGCGTTTAAAGGTGTTTTTTAAGAGACTCCTGCTAGGGGAATCTTGGCGCCTGTGTGTTA
AGACGGCAATTAACTTTTAGTATCAGTGCTTACATTAAATTTTCTCTCTTTCTGCTTTACTAAAGCAGTCATTAAAA
TTCAGTGTGAGTACCATGAAACTTTATCATAAAACCCTGCTTTGCTTAGAGAACCTTGATTGTTTTCTGAAAGCAGC
CTTCTCAGTTTATATATACATAGCTGCCTTCCTTGGAATATCAAATTGCTTTGTGTCACATTAAGAAACACTAGGTT
GAACCTCTATACTGTGTTTTATCTGAGAAAAATACTACTGCAAAAAGTTTGATTTGTTCAAGTTTTAGGATGAAAAT
TTCTTTGTAACAAGTTATTTGAGTTGCATACTATGTCATCGTATATCTCTTTAGTTCAAGTAATTTTGCAATTAACA
TACGGTTATGTAAAGAAGATAATGATTTATTTTTTATTTATATTTTTAAAAGTTATTAAGTGAGGTTTTCCTTTCAG
TAAGAGTTTAGAAAAAATAGCCAGAACAAGTAACTGGACTTGGAAGATAAAGATACCTTTGCACTTCTAAATTTTAC
CTTTGTACACTTCGGTTGTGATTTAATCATTGAAATGCCTCTGCTTTGAAGTAAATGCATCACTTATGGTGTATGCT
GTGTTTTAATAAAGGGAAAACAGTTATGGGTTCTCTGTTGCACATTTGAATGTTGTTATTTTTTGCTGTATTTAATA
ACCTCTTTTTTCTCTTGTGAGGTTTACTTTGGAAATGAGGCATGTTCAAAAATAGGCTGACATTCAGCTTCTATGTT
TTAAATTTAAATGCTGTCTGTGTTTTATCACATCTGGAATGTGTGGGGAGAAAAGATACCAAGTTTTATTATTTAGA
TTTAATTGTAGAATTGCAGATTGATATTTTTCAATGCATTTTCATTATAGTTTCTGCCATGGAGGCAGCGTGAGGGC
TTTCAGGAAGATGGAGTGGTGTAATTACCAGGTGCGCACGTTCATTAATCCTTCCTGGCTAGAGAAAGCTTCAAGTT
CTTCTCCAGTGGCCCATTCGTAAAGCTATAAATATCTAAATTGTGTCAGCCAAGAAGTCACACAGAATGGTGGCTCT
TTTTGAGTTCAATTTCATGCACTGTTGCTTTGGTCTTGTGAGGAAAGCTCTGAATTCCTTAGGATAGTCTTGGTTGT
GAAGTTCCAAAAACAAAATATCAAATCATTAAGGATTTAATTTAAAATACATACTCTTCTTTCACAAACTAGATGAT
TGCAGTAATGTGGATTATAAATTTTTTTTTTTGCTTTATTTCTTTAGAGCTCCTCTTTTTATTTTGTATGATCAAGA
TTATAGCTGAGATTTTGGTGATTTTTTTAAAAAGATTTATGGCTTATGGTCCATCAGTCTCTCCACTACTTCAAACC
TGTGTACCCCTGTATATTATCTGCAGTACTGGAATGTTTGCATTGTATGTGGAAGCTATATACGATTTGGTAAAAAA
TAACACTTAAAGGTCTTCGCTAAGAGTGCTTATTTAATCATTAAATATCCCTTAATAAAAATAATTCCAGAGATATT
GTCTGTGTACAAACTTAAAAAAAGAGAAATATAAAATACTGTGATGTGAATAAAATGTATAGCAATACACTCCAATA
ATACCATTCTTATGTTTTCCCTTGTTCTCAACTGAAATAACTAAGCTAATAGAGACGTCAGTAAGGAATGTGTTGTT
TCTTCATAATACAACTACAAACTCATCTGATAAGAACAACCTGAGAGTGAACGTTAACTTTCCTCATTAGAAAGATT
CAATTTAACACATATATACAAATACATTTTTAAGATAATGATATTTGCAGAGTTTTTGTATTCTATGGAGTAAAGGA
GAATTATCACATATTCAAAGTAAAGGTATAAAATACATCTTAATGTTTTACTTAAATTTTAAAGGGTCCAAAATATA
CTAAAATTGTTTTTCTAATTCTTTCCTATGTTTAAACGTGCCAGAGTCATTGGAAATAGGACATTCTTTTTCTTAAG
AAGATTTTGCCCAAAATATTTAAAACTATTTTCTTTTCCCTTGATTTTACAATTTCAATATTCATGGATTTTTCTAC
TTTAAAAATAACAGTAGTTTTTATGATCTTAAAACAAATGTTTAAGGGCACTTTCGCTCTCTGGAGACTATACCATC
CACATATTTATTATCAGCAAAAGAAAGGGCAGGGCATACTTTTATTTGAAGTTGAGTATAAAAATGTGTCTGTGTGT
GAGTGTTATTAAAAAGATAAGTGAAGAGACAAATATAGAATCCAGGAACATTTTCAGCCTGGCTTTTACTCTCTCTA
AAAATCTAATGAAACCCTTGAGCATCTCTTATCTCAAGGTACATTAGGAACTGTCCAACACTATGATCCGATGGGAG
ATCAGTATATTCATATAAAGAAGAAAATTTGTTGTTAGTGAAAGTCAAGTCTTTTAAAAAAATAATAGTTACAGCAT
TTGCAATATACAAGCATAATAGATTTACTCAACGCCCACCCCCCATCTTTAAAAAATCAATTTCCGACAGTTGTCTA
CTTTAAAATTGAACATATTTGCTACCTGGAGGGAACATTGTAATGTAGCCCATATGTGGTATGCATCCTGAAGAAAA
CCTGAAATTATAGAGGAAGTTATCCTGCCTTCTTTCTTCTGTTGAATGAGTTAAAATATATTAACAATTTGCCTTTC
ACTTTGTATTTATCATTTTGTATCTTTGCATATTTACATATACATTCATGTGTACAAGGGCATATATACTCACAGGT
CAGGGCTATTTAAACAGCTATTTATTTGAATATGCCAGGGAAAATCTCCAAGATATAAAGAAGCAGTTATTAGATAC
TATGTCAGTATAGAATTAACAGCCATCTTTTTTAAGATGGAAGAGAAAATTAATTAATTACATACAATTTCTAACCT
CAAGACATTTTCTTTCTGGAGACAAGGAATACTGAGGTGCTCACGATAGTGAAGACTCAACAAGACCCTAATAAAAT
AGATGAGGATAAGTAAAACTACAATAGCCAATAAAAAACAAAAAACAATAAACCATGTTTCGCTGGCATGTTGGTGA
GTATCTCTGTAATATCTGTCAATAAGGGTCTCTGTAGATTTGGAGTAATGTTCAGGAACTACCTGTACTAGAGAAGA
CAGTGGAGAGGACTCCAGTGGCTAAATTCTGCTGCCTTTGCTTCCAGAAATGTAAATAATAAGGAGGTATTGTGGCA
TTTCCTGGAAGCAGTAGTCTTGTTTCATGGTCTGACTGTATAAGAATGCCTAGAGAAACATAACCTCAGCTGACTAA
ACTCCCTTGATGATTGTCACTTTGTCACTGAACTCTGACCATACCTTTTGCCTCCAGAGGCAAAAGACGGGTGAGGA
AGTGATCTCCTCATCTGGTTTTTAAACAAGTATATAACTAGAGAACTGGATTATCTCCTAAACCCACTCTTGTCCCT
GGAAAAAGGGGAGTCATCCTATCCGTTTCTTAGCCAATTTATGTATACTCTTAGTTTGAGAGCATGAGAAGGAAAAC
TATTTTCTTTTCTTACCTTGGCTGGGTTTTTAAGAATTTATTTTTAGTTTAATCAAAATAATATTTTAAAAGGTAGT
AAGCCTCTCATAAGCAGTTTGATCTGTTCTAAAATAACTTCAATTTTTCTTTTTTTAAACTTTCTTTTATCTTACAC
ACAAAGTATAATAGTAATATGTACTCACTAGAACAAATGAAACAGGATGGAGTCACATAGAGAAATATATCATATTC
TCCCTATCCCCTCCCTTAATATTAACATTTAGGTGTCATGTGCTTCTCCATTAATTTTCATTGCAAAGGCCTAAATT
TTCTTCCAAGAGTGAGGAGTAGCAGCACGGTAGTTTGGACCTGATATAGCTCTCTTTCCCTAGCCTTTTGCTTAAGT
GCTTTCCTAGGGGCTGACTTTACTTACCTAAAGATGTTTCAAGCAAGGGCTCACATTTTTGGTAGCAGAAGACACTT
ACTGATTGCTCTCACTAATAATTTTGAAAGGAATGTCAAAATCTGGGAGGATCATGAAAGAAATATCAGAAATTTCC
TTTCAGCTGCCATTCTCCTTAATACTGTTATCAATAAATTCAGCATCTCATATGTGATAGCAAAAAAGGTGCTGCCT
TTTGTTCTTGCATCCTGAGGTTCTTACCTAATACCATGGTAGCAATAAAGATGGTGAGAAAATTGCTTCTTCTATGG
TGTTCAGGTCCTGAACGAGCACCCTCACCTCCACAGACGGTGGCAGGTATTCAAGCATTTTACAGACTTTGGAGTTA
AATATAGCAGTGTTATTCTAATTTAGGTATGCCACCACCAGCGGCACCGGCAACTGCAATAGGAAAAATGATTGGCA
ATGCCAGCTATCTGATGTTTTCATGTGCCAGGTGCTGTCAGTTCTTCACAGTATTACATTCCATCCTCACAACAAGA
GAGTGCCAGTGAGTGTTGCTGTGTGCCAGTGCCCAGGCTAAGGGCTTTGAACACATTACCCTGTTTTATCCTCATAA
CTTTCCACGTTATTTTTATTCCTGAATGAAGAAACAAGTTCTCTGTAGAGATGCTGTCATTGATCCACTCATATCCT
TTCACATCCGTTTAACATTTTCCCTGCTGTGCTTTTACTCCCAACAACTAGCTCCCTAATCGCTCTGTTGGAGGGTG
GCCTTGAGGCTGCCAGAGCCTATTTGGTCTGTGTAAAGAGAGAGATGGATCTATCCTGGAATTTATGTCCCTGTGTG
TGGGAAGCCCTTAATCAATGACTGCTGGTTGCAGACACATAAATACGTGAGCTTTCTTGTTCCCAACTGAGAAATTC
AGAAGTGTGAATGGCACTGCCACCCTGGGCTTTTATGCCATATATGTGTTTGGTCTGTTTCCCTTCCCAATCTCACT
TCATTTTCCCTTACCAGTGTTTCTTGAAAACACATCCCATTAGATCATTTTTGCATGAAGCTTCATCTCAGAACCTC
CATTTAGGGAACCCAAACTAAGATATTCTCTAAAATAGAAACTTTATTGATAAAGTTTCCAAACTGTCTTAGTAGAT
GGCCAATATAAGACCAAGCCAAATCTTTCTGGGTCCAAATTCCCTGTCTTTAATTAATAGACTCCATTACAACACAT
TCTTCAATCTTTAGTCAGCAAACACTTACCACGTGCCTATTTTATGGCATATTATATTTATACCATAGTTAGGATAT
TATGGTTCATGAATATTTTATATCTGTACACCTGAAATTCTATTGACCTCTCTGGGCCACAGTTTTGCATCTGTAAA
ATCAGCACAATAATGCTACTTATCTCATAGAGTAGACTTAAAAACGAATGAAATGATATATGCCAAGTGTTGAGAAT
CACAATTGGCAATTACTCATGCTCATTAAATATTAGCTGTTTTTATGAGTATTGTTTCATTTTCGGTGCATAATATC
CTATGCAAAGAACAAAAGGTATTGGTATAGGCATTGAAACTTGAAGCATAGAAGAAAAAGTTAATTAACCGGTGCCC
CACTAGATGCCTCTAACTGCTGGCTCCGTGTATCCCTTTAGCCTTGGCTCGTCACGAGAAAACCTTGGAGACATTTC
TGCTGGACTCAGCAGATCAATTTAAGAAAGATGAATGACATTTTTCTTGAAATGTATTCAGTCATAGCTGCCTTTTT
CTACTTTCATATTTTGGAGTTCTTAGAAAAAATTAAGGACTCCTTTTTTTAAAGAAAATGGTATAAAAGAAAATGCA
TATCACTTTGTCACTTTATTATTGTAACCTCATCAAAGTATTCAGTGTAAAGACAGTAGCCAAGTGAACTCTTCTTG
TAATGCTCGGAAACCATTTTAGCAATGGTAAAATTGCTGCAATTTATATTCGTCAAATTGCATGATTTGACTTATTT
TAGAAAAGTTATTAACTTCTGAAGAGAATGCTTCAGAAGCATTTAAATGAGTACAAGTTATCACCAGTGATATACAT
AAATTTCATTTCAAAATATACTTCTAGAAACTGTACTTAGTTAGCTATAGTATTTGTACAAGGATTAATTCCTATTT
CATTTTGTAGGAATTTATTTATGAATGTCTATGGCCTGCCAGTGTAAAGCAGACTTAGAGCATCATCTTTTACAATA
ATCTTTTTTTTTTTAATCAAAGGGGAGATATTCTGGTAAAACAAAACAAAACAAAAACAATAGTTTATTCTGCATTT
TTATTAAGTCCCTCTGTAAGTCATCCCTGAAATGGGATATGTAGAGTCTTATATTTATTTATTTCTCAGAAGCTTAT
TGGAGGTGATATGAAGGATTTTAAGACCCTACTAACTAACAAAACAACAATTTAAAATTAATTTTCAAAATACCTTA
ACAAATCTTATTCTCCTTATTTTCAAATTCTTTAACAATGTTTTTCTTATTACTAACATAATATCTTCTGATGTAGT
CATAATAATATCTAAAATGACAGGTCTAAGTAACTTACATGGATTAATTGAGTCTTCTAAATAGTAAGGTAGATGGC
ACTATTACTTCTATATGAGAAATGAGGAAGTAGAGGTATAAATAAGAAATTTTTTGGCCGGGTGCGGTGGCTCACGC
CTGTAATCCCAGCACTTTGGGAGGCCGAGGCGGGCTGATCACGAGGTCAGGAGATCGAGACCATCCTGGCGAACACG
GTGAAACCCCGTCTCTACTAAAAATATAAAAAATTAGCCTGGCGTGGTAGTGGGTGCCTGTAGTCCCAGCTACTCGG
GAGGCTGAGGCAGGAGAATGGCGTGAACCCGGGAGGTGGAGGTTGCAGTGAGCCGAGATCGCGCCACTGCACTCCAG
CCTGGGTGACAGAGCGAGACTCCATCTCAAAAAAAAAAAAAAAAAAGAAGAAATTTTTTTGAGTGTATACAGTTAGA
AAATGGCAAAATGGGAATTCAGACCCAAACAGTAAGACTCAAGGATACCTTTCTTATCAGTATGCTAATATGAAAAC
CTAAGCATACTAGAAAATCTAAGTGCCAGTTGGAAACCAGAATTAACATTTTGGTGTGTAACTTTCTGGCTGCTTTT
TCTATGCTAACAAACATATATGACATACAAAAATACACACATACACAAATTCCTGTTCACTACTTCTTTTATGTTAA
CATCACAATGTACCGTACACAGCTGTATTATTTTATATTTGATTTCATATTTTTTCTAAAGTCAGTGTATTTGTCAA
ATATCAACTTATCTATTTAATAGGAATATGGGATGATCTTTGCTTATACATACATACATATGTATATAAAAACAAAA
TCAAGTATTTTAAGCGTTCACCAGAAGTCATATGTCAATCAGTAAAGTATATAATTTTTTGCTGCCAATGACATATA
TCATAAAAACGCTACCTATCATAGAATGAAAATGAAACACAGCAATATTGGGACACCTATTCTCAAGCAACAGCTTT
GTGATTTATTAGCTATCTCACATGAAATAACTCATTAACTTGGTATTCCAAGCAGCAAAAGAAGGATCACTTAGGTC
ACTTGCAAAATAATACAAAGCTAGGTTTAGGGGTGGGTTGCGCTTGGTGGGATGTAGATGAAACCATATGGGCCCTT
GAGTTTATAATTGCTGGGATCTGCATGGTGGGTATATGGATGTTTATTACAGTATGCTAGTGAGTTAAGAAAGAAGA
GGAATTATTATTGACTTACATCATAGAGTTTATGCAAAAATTAAACGATAATTTATTTTTAAACTCTAGAGGTATAG
GTACCATCATGAAGGGACCCACAGAACTGATGTAGCCAGTAATTATTGGAGCTGGAACAGATACTCTGCTGTCAGTT
GTTCTGGTTTTGTGGTCATTGTTCTTGCCTTTGCAAGTTACCAACTCTAAGACCTTGGGCAATACTTTAAGTCTTGG
TTGTCTCATCTGTAAAATGGGGAGAGCAGTAAGTGTCTTAAAGGTTTATTCTCATGTTATATGACTTACGGTATGTA
AAACATCTGCGTTTAGACACATAGAGGGTGCTTAATGGATGATTGCTCTCATTATTAGGCTACATCTAATCTATGAA
TTTAAAAACTGTATAGAAATATGTGACAGATTCTTTAAGAGCCAAATACCAACTACAGTGAAAAATACTTAACACTT
GCTGAGCTCTTAGTATGTGTCAGGCTTAACTACCTTAATGCTCATAGCAATCCTATAAGATAGGTACTCTTGTTATC
CTATTTTATATCTTCTAAAATTGAAGCAAGGGAAGTTAAATAATAGGACAAAGATCATACGCTATCTATCCATATAT
ACCCATCTGGCTGTCTACCTGTCTCCTTCCATCCATCCATCCACTTATTCATCTACCCATCCATCCACTCAGTTACT
TCTCTCTCTCCCACCATCCCTTTCCCTTTCCCTCTCCCTCTCCCTGTCTCTGTCACTCTCCTTTACTTATCTATCTA
TCGATGGATCGGTTTATCTATCATCTATCTATCTCTATCATCTATGTATAGTTGTTAATAACACTAACATTTTATAA
ATTACAAGACTGAAAAATGTTTTCATTAACTTATGGTAACAAAAGACCACATTGTGAATAAAAAAAGCAGTAAACAC
AGGTCTCTGCACATATGAAAGAGATGTCCTAAACAGGAAGAGATGTCCTAAACAGTAGGGATACATAGTATCATACA
ATCAAAACATGGCAGCCCTATAAAACTTACAAAGCAATTTCATGTAAGTTATTTCATTTGACTCTTACCACAATCTA
TGAGGTTACTATTTTTATTTTTCTCATTTTACAGGTTAAATTTAATATGGCTTCCAATAAAAAATTAGTATGGTTAA
TAAATATCTTGACGTCTTGCTCCTATAATCCTACCGATAGTTTACAGTAATTAGTAAAATAAAATAATAGGAAAAAT
ACCTTTGATACTAGTATTAAATTATAATCATATCATTAGGTAATTTCAATTTGTGATTTTCAAGAATCTGTAATATG
GTAGCTTCTTCCTACTGACATGTTTGAATTCATTTTAAGGCTTATAATTCACAAGTAATCTATATATTATCTAAAAT
GTAAATGCACATTCACATGGAGATAATAAATTAGCGTGAAATGGCTGTATTTTGCTCTCTATAATTTTTAACATACA
GGAAATCACTGTTGTCTCAAAAATCAAGGAAATATAGTATTTGAGGTGAACTTATTCTTTCTACTATTAACACATTT
TAATATAGTTCTCTCACAGTGCAACAGAGCAAGAAGCTTTCAGACACATTTGCTGCTGCAAGGAGCATGCTGTGCTG
AACTTAAAACACCTTCCCTTTCAAACTCCTTGGGACTGTTTTTTTCCAAGAGACTTCAAATGCACTAAATTTAGCAT
CCGTTGGAGGCACACCCAGGCATATTATAGTGAAAGCCCCAATAACTGAATGTGTTACCACTATTCACAATGTTTAT
GTGTGTATATGCCTTATCTATGATGTATTGCAAATTACAAAAATTGTGTTATTATTCACAGTAACAAAAACACTTCC
AGCAAATTTCTAACAGTGATCTCTTTTGAAATAACTTACATACATGTGTCATGGGTCTTAAACTTTGTCACTTTTAT
GTTTCCATCATGTTGTTTTAGCCAGTGAGGGTTTTGTTTGGTTTTCATTTATGATTATATACTTTCAAAAAATAGAT
TTCAAAGTGTGAATTTGATTGATTGATTGACTGATTCATTGAGACGGTGTTTCACTCTTGTTGCCCAGGCTGGGGTG
CAATGGTGCGATCTCGGCTCACCACAACCTCTACCACCCAGGTTCAAGCGATTCTCCTGCCTCAGCCTCCCTAGTAG
CTGGGATTACAGATGTGCACCACCACGCCTGGCTAATTTTTTGTATTTTTAGTAGAGACAGGGGTTCACCATGTTGG
CCAGGCTGGTCTCGAACTCCTGACCTCAGGTGATCCACCCTCCTCAGCTTCCCAAAGCACTGGAATTCCAGACGTGA
GCCACCGCGCCCAGCCCGTGAATTTTATTTTTGAAAGACAAGAATGTCCTTGCCTAATTGCATAATAGTTTAACATC
ATGAAGACTAAATATGCTTTTTAGCCATGACAATTTTATTTATTATTGTTTTCATTTTTAATTTTCTCAAAGATCCT
CATCAGTGTACTCTTTTTGGTCTTCCTTATAAGCGTATTTTAACAGGACATAATAATAAGATAAATCCCAACTTTTT
AAAGTTGTATCCGTATGTATTACTTTAAAGTGCTATTAATATAAACGAATTAGAGGCAACTTTTATTCAATCAGATT
TTAAGTAATTTTACCAAAAATATGGCCTTGATAATGTCTCTGTAACAGGTTCTCTGTAATATACATGCTGAGGATTG
GTTTGTCTTTGCTTTTGATACTATTTTAATTAGAAAAGTAATGGGGAATCCAGACCCTTCTCATTTAATAATCCAGA
GAAAAATCAGTCCATGTTCTAATAGTTTAAATTTTTCTACTAAAACCCATGTGAGAATCCATATGAGTGGAATGGAG
AGGAGTTCAGCTTCAAAGTTGGCAGATTTGAGATGATTCTATGGCAACAGAAATGTGCTTGAGGGAAATCAGTTGCG
GCATCTTCTATAATTGTGTCACCTAGATTTTGCCTTAGGAATTTCTAGATTTCCATAGAACATTGTGACCTCAAATG
CTTTATCTTAATAAAGAAATAAAAGCAGATTAGAAGAATTATTTGCCTACAGTTTGTGGGAGATGGGCAAGTCTTAA
GAGTTTATTAGGTACCCAGAACGAAACATATTTTCTTGGGCCTCATAATCACATTGAAATACAAGGATTTAGTTATA
CACAGTGACCAGTTAGTGAATGACAGTCTTCAGTATCTAGTAGACAGTAAACATATAAAGATGTATTTGTGGCCGGG
CACGGTGGCTCACGCCTGTAATCCCAGCACTTTGGGAGGCCGAGGCGGGCGGATCACGAGGTCAGGAGACCGAGACC
ATCCTGGCTAACACGGTGAAACCTCGTCTCTACTAAAAAATACAAAAAAAAAAAAATTAGCCATGCGTGGTGGCGGG
CGCCTGTGGTCCCAGCTACTCGGGAGGTTAAGGCAGGAGAATGGCGTGAACCCGGGAGGCGGAGCTTGCAGTGAGCA
GAGGTCAGGCCACTGCACTCCAGCCTGGGCGACAGAGGGAGACTCCATCTCAAAAAGAAAAAAAAAAAAAATGTATT
TTTACTTTTAACTACAGCGAGAGACCCTGGCAGCCTACAGCATACAATTAGTGTTCATTATTTAGATTGCATGGATT
TAATGTGAGGGGTCAATTACTTGTCTAACCAGTGAGCCTAGCCTCTTGCTCAATACTGCCTGCTTCATGAGGGTGAA
CTGTGCTGGAGAAATATATTACAGGATTATCTGCAGATTTTTTTTAAATGAGTGGTTAAGTCAAAAGTTCTTGTGAA
AATTCAGAGTAATAAATTATTATGAAGTTGTGTAACTAGGTAAAGGATAGTTTCTTTTACACGGGTAAAGATTAACA
TGAGGAGGAAAACTTTAGCAATGGCATTTAATTCCATTCAATATATTTATATTGAGCTCCTTTAAAAATACAGGGCC
TTGTGGTGGGTGCTGAGGACAGAACAAAAACCAAGTAATACATGAACATAACCCTTGATTTCATGATCTAGTAGACC
TATAAAAGTTGTCGATATCTGATGAAAAGAAAATGGTAAAGATATTCCAAACAGTGTATGCAAATCCAGAGATAGGA
TGGAGGGGCTCTACCTGAAGGATGATGATAAGAAAACCGTGTTGAGTGAAGGGTGATTTGTGGAATTCAGATAAAAT
ATCAGTCTTGAATGCTGAGTGAATACTCAATGATTGACTAGATCCCATGGACAGTAATTTCTTCAATTATGACGATG
CTAGTGTTTATGACTATAACTATCATTCTCCATGCCAGGCACTTTGCCATTTGGTAAATGTATAGTGTGCTATTCTA
ACAAGCATGCACAGAGCTTTTACTTTAATGTATCCATGAGTTTATTGGGGTTCAGAATTTAGGTAAGCTTTGCAAGG
TCGTAGCATGGAGTAAAATATCTGAAATTCAGACCCATATCTAACTAAGTTCAAAGACTGTACAGATATTTCTCCTC
CTTTGTGCAGAGAAGGATAGGAATGGTTCCATATTATCATGGACTTAGTCAGATGTTTTAAAATTATAATGTCCTGT
GTTAATGAAGAAGGGATGATATTCAGTGCATATTCTTAACCGTTACTTTGCTTAATGCTCTCGACTTTTCTGTGAGA
TGGATAGTGTAGATAAAATCCCCAAGGGGACTCAGCAAGTGCAAGTAAAACAATGAAACTTTAAAGCCCTTTGTCAA
AACCTCTCTTTTTCTCAGAGGATGGAAGGGCCGTAAAGGTTGGTGAGGAAGGATGGACCATTTCCTATGTAGTCTTC
TGACAATATTCAAACAAAAGGAGAGTCAGCAAATCCCCCTTGATGTGGGAAGTTTTAATACAATTTGCAGAGTGTCT
CTCTGGAGTAGACATCCTCCTCTGCAATCGTGTCTTCTATATAGCCTCAGGGCTTTGGGTAGGTAATCCTCTCCAAG
GAGAGTCCTGGAGAGGGCTGTCTACCCCCCTTGCACCATCCTCTAACATTATTCTATAGCTCAGCTCCTTGTTTCTG
TTTCCTGCCTTGTTTTTGTCTGAGTCTGCAATTATGATGTAAGCACCATGAAGGAAGGTATGTTGCCAGTGTTTGCA
TCAGCATATCCCCCGTGTGTAGCAGCGCAAGGGATATAGTGAGCCCTCAATGTCTATTTGTAGAAAAAAGAATGAAC
GTATCAACGAAATCTGATACATATTCATTGTGTCTGTTATCTCCATCTCTCTTGTCCTGCCTTGTTATCTTGCCATT
TTCACAAAAGGCCCCAAGGCCCATCATTTCTTGTGTAACTTCCAGAGTGTTAATTTTTAAATTAAAATTAAGGCTTT
CTACATGAGTGTCTATTATTTGAGAAACCATGCAAGATCGTGTGTGTGTGTGTGTGTGTGTGTGTGTGTGTGTGTGT
GTGTGTGTTGCACTCTATATTATATTGAATTCTGGATTTTTTCTTATAAATAAAATTTTAAAAATAGTTCTTTAAAA
ATAGGAATAAGATGTTTTAGGAGGCACAGAGAGCAAAGGAGAATAAAAATTGCAGGTTTGGGGTTGTGCATACTAAT
TGCCATTGAGTAAAGAGAGCACACTGAGGCCATTTAGAAGAGAATTAACGTGTTTTGTTTTTGTTTTTGTTTTTGTT
TTTGTTTTTGTTTTTGTTTTGAGACGGAGTCTCGCTCTGTCACCCAGGCTGAAGTGCAGTGGTATGATCTCGGCTCA
CTGCAACCTCCACCTCCCGGGTTCAAGTGATTCTTGTGCCTCGGCCTCCCAAGCAGCTGGGATTAGAGGCGCCCACA
ACCACGCCAGGCTATTTGTTTTTTTTTTTTGTATTTTTAGTAGAGACGGGGTTTCACCATGTTGGCCAGGCTGGTCT
CGAACTCCTAGCCTCAAGTCATCCACCCGACTCAGCCTCCCAAAGTGTTGGGATTATAGGTGTGATCCACTGCACCT
GACCTTATTTTTATTCATTTAAAAATATTAAATGTTACTGCATAGGGAGTAATGGGCTTAACAATGAGGTGACCAAA
ACTCCTATGTACCATGCAGAGCAATGTATCAAATGTTTTTAACTATAAACTTCTCAAAAACATAAACCTAATTGTTC
TGCAGCTGCAGGTTATATCTGCCTTGTTTGAGCAAAATTTGGTGGTGAAAATGCCTTGCTTCCATTTTTCCTTCAAT
AACTGATATGGTTTGGCTGTGTCCCCACCCAAATCTCATCTTGAATTCTACTCCCATAATTCCTACTTGTTGTGGGA
GGGATCCAGTGGGAGGTCATTTGAATCATGGGGGCGGTTTCCCCCATACTGTTCTCATGGTACTGAATAAGTCTCAC
GAGATCTGTTGGTTTTATCAGGGGTTTCTGCTCTTGCGTCTCCACATTTTCTCTTCTGCTTCCATGTAAGAAGTGCC
TTTCACCTCCCACCATGATTCTGAGGCCTCCCCAGTCATGTGGAACTATAAGTTCAATTAAACTACTTTTTCTTCCC
AGTCTCAAGTATGTCTTTATCACAGCATGAAAACGGACTAATACAATAACCTATATAATTTTGAAAAGTACTTGTCT
AATAGACTTTCACAATAGAAACTATATCCTTATCAACTTTGAAAAGTCATTGCTTAATGCCTTTGGATAACTGAATT
TTCTAAGATTATTTTAATTTTGAAAGTTAAATTTTATCCCAGTGTTGACGATTTTTGTATGCTACTTTTAAAATATT
TTGTCAGTGATTTATATCTATGGTGCAATCTTGTAAAAAATTAACAATGCAAATGTGGCTAGACCATTTAAAAATCA
ATATGTTATAATTCAGCCCATTTAATCACTTTAGTTAAACATCTTAGGAACAACTCAGTTCCATTTGAGAGAAGACA
CAGTTTTCTAGATGTGTGTTGTGGCATCATATTGCTTTACAATATCTTACATAAGGTGAATTCAAATCATATCATTG
AATCTGTTTTAAATTCTGTCATAGCTTAAGATTAGTGACTAAATATTGGCAGGTTTATGGAAGTAGGATGTAAACAA
GACAAAAACAAGGGTGGAACAAGTAATTTTAGTATATTATTCACTTGCACAGAGAAAAGTCATTCACACCTTCTTCA
GCTTTGTGAAGAAAATAGACTAAAATCCTGTTGATATAGCAACTATGTTTTCCGTTTCTTGTATAAAAATAAAGAAA
ACTTCCTATTAGGAATTAGCCAGACATTTTAATTTTCTCTCTTCTTTCTCTATTTTCCCTTACAGTCTCTTTGAAGG
CAGGCAAAATTTCTATAAAGTTTTAAGAATGTTTTAAGATTTTTTTATTGTGAAATATTCATAGACTCACAAGGAGT
TGCAAAAACAGTACAGAGATTTCCTGTGTATACATAACCCAACTTTCCCCAGTTACATATTAACCAAATACAGTATA
TTACCAAACCCAATAAACTGACATTGGCACAGTGCAATCAACTAGACTGTAGACCTTACTTGGATTTCACCTGTTTT
TGCACATGCTCTTTTACTGTGAGTCATTATCTGTTATTCTATGACATTAACCATGTCTATAGATTTATATAGTTACT
ACCACTATCAAGATAAAGAAGTGTTTCATCACCACAAAGTAACTTAAAGGATTATTTTTATAAAGTAATGACAAATG
TGTCAAAAGCCATTCCTGTGTTATATAGCAAGTATGTTTTGAGTTATTAAAACTCACTGATCATGTCTTTCAGTGTC
ATAACTTTGGGTTTCCCTCCCTAACTATAATAATCCTGATGAATTACAGTTGATGAATATGAGAATATCCAACTCTT
CCTGACTCTATAAATATATTGACTGAGATTGTAATATTTATGGTGTCTTAAGGGGCGCTTGTTTTATTATGATGATG
TGAACATGTTGAGAATAGTAAGAACAGCCCAGTTTAGCAAACAGGATATGAGTCTTCTATATCCAGCTCAATCGTTG
CCCCAACAGGGGACATCTGCCTTTGCTACTTAATTTTCCATTCTGGAAAATGTGAAGTGTATGAGAATGAATAATCG
TCTCCGATTTTCCAGCACATAATAATCTGAGGAGAGCAGGTACAGCAATTTAGGAGCTGTTTTCTTTTGGTTTCCAA
AAAAAGTTCCGTCCAGTGGTCTAAGTTAGTCGTTTACTAAGTGATAGAGCAATTGGCTATGCTTTTTGAACGGACTG
ATAATTATGTGGATGCAGCAAATAGGATATAGACAATGCATCTACTCCATTACAGTAAAAAAGACTCTGATAGCAGT
TAATCCACATACCAGGCACTTAGCTTAGGCACAGTTGGAGGAAATGGAATGGTAATAGACTGTAGTATGGCATGACA
GGAGCTGTAGCTTGAGATTCAGAATTCCAACTCTGCCTCTCAATATTTGAGTCCTCATGGCCAAGATATGTAAAGTG
CTCTGTGCAGGTCTTGGCAACCATCCACCACACACTTAGTATGCAATATCTATCTTTATTAGTCAAGGATCTGGAAA
GCTAGTTGATGAGACAAATGATAGAAACAAGAGTTCATTAGATGAAATAAAGTAATAAATGATGCAAGAATTTAAAA
AAGATTTAGAGAAGGAAAGGGAACAGAACTCACATGCAAGTAGAGCAACTGTGTATCAGATAATGTGCTAGCTGAGT
TAGAAACCATGTCTCATATTACCCTGAAAATAATTCTGCAAAGCTGTAGGTGTTATTTTTTTCATTTGACAGGTGAA
TTCATGAAGGCTTGAATATAGGGTTAAGTGAGTTGTTTCAATGTAGTTATTGATTCAAATCAAGATCTGAATGACTC
TAAATATGGTGCTATAGAGATTTGAAGTAGGATAAATAGGATTTGAAAAAAAGAAAAAATATATAGGGAAAGGAATT
GGTACACTGTAGCAGTGTCATAAATGAAGCTTCAGTTGTGTGATTCCAGATGATGTATGTGAGGCCTAATCAAACAG
CTTTGTGGAATCAAAATTTCTGCTCTTGTCTCCAACTGGGGACGAGTTGGCTCGGGATTAAGGTGGGCGACCTTGGG
AAGACTAGAGTCTAAGCAGGACTTTAGTCCCTCATAAGAATTATATGAGGATGTATATTTGCATACAAATTCCTGGG
CCCACCGAGATCTGCCAAATTGGAATGTGTGGTGATATCACCCAGGGAAACATAGAGAGCTGTTATAATTAGTCATG
AAATATTTAGTACTGAAATTATAGATTATGTTAAATAATCACTTATAGGGGACATAGCAGGGTTGGCAGGTTAACCA
TACAGCAAACAGGGTTGTAAGTCAGGGCCTAGAGAATTTTCAAGAGGCAGGAATTCTGCAGAATGAAGGCCTGGTCT
CATGCAGCACCATGGACAGCTCCGAGGCACTCTTGTTTCTCCAAAAACCTGAAATCAAAAACTTTGCTTTTCATCAT
GCAACATACCCATGTAACAATCCTGCATAGGTACTCCCTAGTCCAAAATTAAAGTTGAAAAAAAAAACTATACTTTC
ATTTGAATACAGTTCTCTTCGGCTTTACCAGCTCTACTCTGGAAGGAATATCTTTTACTCAATGAAAGGCCATCCCC
TGTTAATGCCTGGCCAGGTTCTCCTTATCAGTCATTCACTATCTTTGTGTGTGAGTGACTAAACATATAATGCTATG
TTTAGTGGATGGAGTAAGATTACCTTTGCAGAGGTTGTACTGGCTTACCCCTTTGGTTCTTGTAGTTTTCTTCTATT
AGAGTTTTTTCCATCCCTAGGTTTCTATACTGTTCAAATGGGTTTAAGATTCTTGAAGGTATTCCTCTGACCTTGTA
ATTTATGCTTGTCTCCTAGCACAACTTTTTTTTGTAAAGGAGGCACCAACTATGTGGTTTGCTGGCGATGGCATACA
CAAATCAGGTGGGAGGAATTAATGAGAGCAGCAATTCCAATATCTGGTTCTTCAAGATTAACTTGTATAGTTTAATT
CAGCATTCTAAATAAGCCTCATAGATTTAAAAATCTAGAATAAACCCACATTTTTAAAAAAAGTTTTATGTTATCTG
TGCTGATAATGCACGCTGTACATAATAAAATATTATTTTCTTTTTTTTAAATTTATTATTATACTTTAAGTTTTAGG
GCACATGTGCACAATGTGCAGGTTAGTTACATATGTATACATGTGCCATGCTGGTGCGCTGCACCCACTAACTCGTC
ATCTAGCTTAAGGTAAATCTCCCAATGCTATCCCTCCCCCTTCCCCCCACCCCACAGCAGTCCCCAGAGTGTGATAT
TCCCCTTCCTGTGTCCATGTGTTCTCATTGTTCAATTCCCAATATTATTTTCTAAGTGGCAGTGGAAGAAACATGGA
AAGTTCTACTTCATCCATCGGTGGATTAGAATTTGTATACCATGAGATGATTAATTTTCAAAACCAGTTTGAATCTC
ACAAAATAATGACCCTGTTTTTTGAAGGACAAGGCAGAACAAGGAACTAGGCTGTGCCACGTTCAAGTCACAATCTC
TAACATTTGTTTTGTTTTGTTTTGTTTTGTTTTGTTTTGTTTTGTTTTGTTTAATCTCTGTTGCTTGTTCACTTTCT
CTTGTAATCTGCATTGATTTGCTACCTGGCTATTTGTAGATTGACTTCGGCTGCCAGGAATGGAATGTTTTTCATAA
AGGAACATATGCCTTAATGAAAGTACCATAAGAAGGGAGTAGAGTGTGACCAATTGCCTAGGTAATAAGTAGTGACA
ACAATGATATTATTCTAGTATAAATGGAATCAGTTTTTCTTTGCCCAGGGGGCATGATAAAGAAGGCCTGGCTGGTA
TATACTAGGTGGGACACACCAACAGTGCCTAGAATGTCAATGGATCAAACCTGAGGGAACCAGAAGTTGAAAAGACA
TATCCCAAAAGAAAGCATTTGATGTTTAAGGGTTGGCTTACTTAGAACACAATGAAAAATATTACTAAAATTAAAAC
TATGATTTTAGCTATTTTTAAATATGACAAATTAAATAGCAGAACATTTTAATAAAACATTACTTAAGGTCCACAAT
TTTCTGTAAGTCTAATACATGGGTCATTAAAATAAAAAATTCCCCATGATTTATGGAATCAGATTTTTTTAATACAA
CGAATTCTAAATGGTTTTATAATGCCAATTCCAATTAATATCCTAATTATAACATGTCATCCAGAAGGGTTAATGAC
TAAATTTTATTAATATTTGTTTTCTATTTATTTTGATTTGTGCAGTTTATGTGTATAGTAACGATAGCTGCAAATTA
GATACCATTAGCATTAAATAAGGTATATATTTTAATAGAAAATTAAAGTTAAGTATTTGAGCTAGCCTAAAATATTC
AACAACTTAAATTTGTTTTTTGTGGATCACATTTTTTTGAGACAAAGTCTTGCTCTGCTGCCCAGGCTTGAGTGCAG
TGGTGCATTCATGGCTCACTGCCTCAACCATCCAGGCTCAGGTGATCCTCCCACCTCAGCCTCCCGGGTAGCTGAGG
CTACTGGCGCACGCCACCATGCCCAGCTAATTTTTTGTATTTTTTTTTAGAGATGGTGTTTCACCATCTGGTCTCAA
ACTCCTGAGCTCAAGCAATCTGCCCACCTTGGCCTCCCAAAATGCCGAGATTACAGGCGTGATCCAGTGCACTCACC
CCTGTGAACCACCATTAAATAGCTAATAAAAGATGCATGTCAATAAAAATAAACAACTTACTAGAATGATTATGTGA
AAATCATTTATTCTTCCAAAGCATGAATTTTCAAACACACCTTTTGTTACTGTTTTAAGAAGGGAATCATTTCCATA
TATTTGCATGTAAATCACTTTTAGTCTCAGAGAACTTTCCATAAAAGTTTTTTTATTACTGCTGTAACCGATAGAGC
TAGTGGACTATTAATTTAAAAAGCTGTACATAAAAACACATCTATAGCTCAAATAATCTAGGATACCTTTTAGTTTG
GGGAAATGTAGATGAAAATGAAGTAATTACAGAATCCTTGTTAATTTTCAGATTTAGACAGTCTAGGCAATATCTTT
CAGGAATGAAGAGATATGTGTTTTTTGGCATCTTGGTAGAGTATATTCCCATTGTAATTCTTTTGTGAAGTCTAGAC
CAGATGTGGCCATAAAAATAGACCCCTACTACAATAATATATTTCATAGATAATCCAATAAAGTCAAATCTTATTGC
AGTAGGCTTAGAACTCTGTTTGCACCCATGGAATTTATATCAGTTTTTGGCAAATCCTTTCATCTCTGAGGATACTT
TTTCATCTCACATATACCCTATTTTCTGAACATTTTGCCTTCAAAGTATACCTCATTTATCAAGAATTTCTCTTTAT
TCATCTGACTTATACAAGTGGCAATAACAACGTCTGGTTCCCATGAAGTAACCAGTGACCCTTTGAAATAATATAGC
GCTGGAAGAAAGAAAAGGAAAGGGAGACTGATCATTCAGCAACTCTTTAAAACCATGTCACCGTTAAACACATAGTT
TATTTTATCTTTTTTTTAGAATTGTGAAAACCTATATTAGCATCTTCACGGATGTCTCCTTTGTTTACATCCCCGCT
TCTGTGCCTTGCCTGCAGTAGAAAAAAAAAGGACATGTGTATCCCTATTCCCCATTGTCTTCTCATTCTACATGAGA
ATGAGAATTCTTTTAATTTCTTCTCTATCTACATGAACCCACTTCCATTATCTGTTTGTTCAGTTCTTTAAATGCCC
TGAAGCTAGCTCTGTGACTGGGCAGTTGAAAGTTCTGGACTTAGCATCAGGTTAATTTGAAAAATACTTATTGAGCC
ACCACCATATGTCAGCCACTACTGTAGATGTTTTGAATGTGTCAGTGAACAAAGCAGAAAAGATGTATGCCCTCTGG
ATTCTTGGGGGTCTCAAATAGTGAAAGACAGATACGATAAGTATATTGTATAGTATGTTCAAAAGTGATAAGTGCTG
TGAAAAAAAAGAAGAAGGGTAAAATAAGAGATGGCTCATGCTGGAGTACATTCCAATTTTAAATAGGGTATCATGGT
ATTCTTCATTGAGAAGGTGACATTTGAGCAAAGATCTCAAAGAATGAGGCATGGGGTTGAATCATGTAGATATCAGC
AGTAAACTCATTTTGGGTTCAGTAAACAGTCAATGCAGAATTCCTAAGCCATCGGTTTATCTGCTGTTTGGGGCTGG
TTATCTGCAGTGTGGCTAGAGTGAAGTAAGTGAGAGAGGTTTAGGAGAGAATGTTAGTGAGGTGAGGGTGGACCTTT
GAAGCCATTGTAAGGACGTTTTTCTCTTTCTAAGTGTGAGAAGATGATGCTGACTGAGACCAGGGTGATAAGAAATA
GTCATATTCTGAACGTGTTTGGAAGTGGGGCCAACAAGGATTTCTGGATGAATTGGATAAGGGGCATGGGAGAAAAA
TGGAGTCATGAATGGCTCCAACGTTTTTGCTCTGATTAACTGGAAGGGATAAAGTTGCCCTAAACTGAAATAATAAA
GACTATAGATAGAATGGGGCGATTAGGGAGGCATTAAATTTGGATATCTGTTAGACATATCACCAGATATATTGAAT
AGGCAATTGAATAAATACCTTTAGAGTTCAGCAAAAAAGGTCCAGGTTGGACGTTTAAATTTCGGAGGTGTTTGTAT
AAGATAACATTTAAAGCTGTGATATCAGATTGTATCACTAAGGAAGAATATAGATAGAAATGACAACGTGACTAAGG
ACTCTAACATTAAGAGGTGGATTGACAAAGGAGAAAACAGCACAGGATAATGAAAAGGAATGATCAGCCAGGCATGG
TGGCTCACACCTGTAATCCTAGTACTTTGGGAGGCCGAGGCGGGCAGATCACGAGGTCAGGAGTTGGAGACCAGCCT
GGCCAACATGGTGAAACCCCATCTCTACTAAAAATACAAAATTAGCTGGGTGTGGTGGCACACACCTGTAGTCCCAG
CTGCTCTGGAGGCTGAGGCAGAAGAATTGCTTGTACCTAGGAGACAGAGGTTGCAGTGAGCCAAAAGATTGTGCCAC
TGCGCTCCAACCTGGGCGATGGAGCGAGACTTCATCTAAAAAAAAAAAAAAAAAAAAAAAAAAAAAAAAGAAAAGAA
AAGGAGTGATCAATGAGATGGGAAGAAAAACAAAAGTGTGTGGTGTCCTCAAAAACTGACGTTCTATTTTCAAAACC
TACATTTTGGGTCTCCTTTTACTATATCCTGACTTTCTAGCTATATAACCAAAAGGAGAAAGCAGTAATTTTTTTAG
ATATAACATGTTAATAACTCTAAGGGTATTCAATGAATCTGAATAATTCAGTGGTATAATGTGAAAAAATATAGTAT
TCATAGGAAAAGGAACAGAAGTTAGCTCAGGAAATGACTTGAATGAACACCGAAGCCAAATCTCCAGCGCAGGTCCA
CGTATTATTTGTCTCAGTGGTTGAATTAGCAGCAAGATTCCTTAGTAGGATGAAAAAAGATGTTGTGAGCATCTGTA
TCTACATGACTGAATTAAATTCCTCCAACAATGAAATGTAGTTAACGTAGTATCTCGAAAAGAACCCTAAGTGGAAT
TCAGGGAACCTAAATTCCAACCATGGTTTTGCTGCTGACTGATTGCATTCACTTCAAATCTATCATTAACCTCCTTG
TGCCTCATTATCCTCATTTCACCAAATAAGAAAAATGAAATATTCCTCCTTCCCTACCTCACTAGGATGTTGTGGAT
TTAAATGTGTGAGAAGTGCTTGAGATGCATAAAATTTGATGGAGTGTTTTATTCATGAATTCAAGGCATCTGAAGTA
ATTTGACCATGATGGACAGTTGCTTCCTTGCACATTTTTTAGAGTGACATTTCCGTTACTGACCCACCCATTTATGC
AACATGTTGCCTAATCTAAATTTAGGTCAAAACAAATTGACCTTATAGGTAAGCATTATATCTATTAATATTGTATT
TTTGTATTATTTTATAATATTCATCATTCACCTATTTTCTCATGCAATATATGTTACTGAACACATATAGATTAAAA
AGCCTTCATCCCTAAATAACAATGATGGGACCTTCCATTTTTATATCCCTCTGGCATTTAAAATGTGCTTTTATAGC
CATCATCTCCATTGATCTCTCAGTCCCTTGAGGTTGATATGACAGATATGCTTTTTCCATTTTAAAATTACGGAACT
GACAGTCTCAGATGACTTTACCCTCCAACTACTGTGTGAAGAAGCAGGGTCTGGCACTGAGGTCTTCTGACATCCAG
TGTAGAGCACTATACTTCACAATATGGCCATTGGCTTACTTTATTACAAGCACTAAATATTTTCCACTGAATACGTA
ATACCTAGAGGAGAATGTCGTGTAAAACAGCAGCAGTAGAACAGAGGATTAAATGACCCATTTTCTTGAAGTTATCT
TAGTTTTAAAGGGTTTTTTCTTCATCACTAATGACCATCCCTGACTAAGAAATTATTCTCATAATACATGATAATAT
CTGCGTTTTCCAATGCGACAAGAATGTTAGGATGTCTATACATGATCTTGACAATCCCTAGCTCCATCACAATGTGT
CCAAATTCATTTTATTTGGCTAGACAGGCATGTAGTCTTACTTTCAATGGTTGGCTCTGCTGGATGCTATGTGATCT
AGAACCTGTCACTTACCCCTTCTAAACTTCAGGAATTTTTTATCCTTAAGATAACAAGAAAACTCGTACCTGTTTCA
AAGAGCTGTTTGTTCAATCACCTATCCATTGATTATCTTCTATATGCCAAATGTTTTTCTAGGTGCTGAATTACAGG
AATGAATCAGAAGCAAAAAGTTCTTACTCTCAAGGATCTTATATGCTAATGAAATAGATGTTAAAAAATAACAATTT
TTGTTTCATTTTATTTTATTTTATTTTGTTGAGACAGAGTCTCACTCTGTCACCCAGGCTGGAGTGCAGTGGCACAG
TCTCTGCTCACTGCAACCTCTGCCTCCCGGGTTCAAATGATTCTCCTGCCTCAGCCTACCGAGTAGCTGGGATTACA
GGCATGCGCCACCATGCCTGGCTAATTTTTGTATTTTTAGTAGAGATGGGGTTTCACCATATTGGCCAGGCTGTTCT
CGAGCTCCTGACCTCAGGTGATCTGCCCTCCACGGCCTCCCAAAGTGCTGGGATTACGGGCATGAGCCAGCGCACCT
GGCATTAAAAAGTAATAACAATTTTTAAATATCAATATGTCTTATACAGAAAAGTGAGCAGTGTGGTAGAGTGTAAC
TGGAATGTGAGTTGAGACATAACACCAGACAGAGAAGCCAGAGAAGGACTTTTGTTTGAGGAAATGACATTTGAAAA
GGAACCTGAATAGTGACAGAGGCAGATACCTAAAGAATATGTTCCAGACAAAGGAAACAAAAAGCGTGCAATTGCAT
AGTCAACTTAGCCTACTTGAGGAAAAGTGTGAGTGGATTTTGGTGATGGAGAGGTAAGTGCCAGGAGATGAAGGGAG
AGATCTGGCATGCATCAGATGATGTGCAGTCTTCCGGGACGTTGTAAAGAGTTGGGCTTTTTTTGTTTATAAATTAA
ATGTTAAGCCATTGGGGTTTTTAACCAGAGGAGTTATGTGATATGATCTATAGTTAAATTATGTTTGTTCTTGGATG
GAGTGTGCATTATGGGAATTTATACAGAAACAAGATTTCACATATATATATATATAAAACTCAGTGTCAATAGAAAA
TAATAAAAACAAATTTTATCCATTGATAATTCTGGCATTGATAGTAGTGGGTATGGTGGTAATAATTGTGTGTAACA
CTCAAACTTTCTGAAAACCTACACTTGATCTGTAAATCCAAAAGTATATGTAGCAAAAGCCATAATCTGCTCTTATT
TCTGCACCACTTGCACCAGTGTGGAGTGATAAGGCAAATTATTCAGGCACCTGTGTAAGCCTTCAGTGTCCTCACCC
CCTTGTTATAACTCTCCACTAATATTACATTGGTAAAGACGTCCCTGACCTATATGTCACTGAGACCTCAAAGAAAA
GAGCAAAGCTAAAGCGTAAGGGGGAAAAAAGCCAGCTTAAAAAGACTTAAAGGTTTCTGGGACCAAAAAAAAAAAAA
AAAAGTCTTTGAAAAATGAGAAAGGAAGGATAGAAGAAAAGATTCTCCTTTGGTCAATCTGGCCAACCTTTGGAAAT
AAAAAGTATTGTGTTGCAGCTAATAACTATTTGTCACTGCAGGCACTTGCTGATGTCTGCCCTTTAAAATGACCCAA
ACTCGTTGGCCTCGAAATCAGAAGCCAAGGAAAAAATCTTGGACATAATGTTTTCTGTAGAATTACCAATTTTCTCT
CTCTCTCTCTCTCTCTCTCTCTCCCTCCCTCTCTCTCTCTCTCTCCATATCTATATATATATAGATGTATATATATT
TTTTCTGTAGGAACTACCAATTCCTATCTATAGGGACTGATTGAGAAGTCCCTTATAGCAGTTTTTCTTTGGCTTTT
AGGATGCAATGATTATTGGTGAGAATAACTCTTTCATTTCACATTTGTCATTGGCTTATTTGAATGTAATCCTGATT
CAATCGTTATGATCTCCTTTAAGTAGGAAGAGAAGCTGGTATTACATTGTAGGATTTTAATTTTGTACTCATGAAAC
TTTTGAAAAACATTACTCATACTCTTCTGACTGTCAAATTGGCCTCTAAGAGGTCCACATCTCAAGAGGTATCAAGC
ATTGGTAACTATTTTTTGGTGTTGTTTTCTCATCATAAAATGTACTTTTATTAGGTGACTTTGGAAATTTTATTGAA
TCAATGCATGACACTGCCTCATTCTAGTAATCTGATGAAGCAAAGCTGAAAAACAAAATTTGAGGATTGTCAGTATA
TATACTTTTATTTGCAGTCAAGAGTTATGCTGCAAAAATGGTTTATTGAAGTAACAAAATTTTAGCTGATATATTAA
TCTGAAAGATACAGTATACATTTTTAGTATGGAAAAGATGAGGAAAAGGAGGTTCTCTTTCCTCTAGGTATCTAGAG
CAAACTGTAACTGTCCTTGGTATTTAATTTTTGGCTAAGGTACTGAGATTAGAGGTGGGGCCTTAGATATGATTAAT
TGTCAGACTGATAAGCTAGATATTTCATTGAGTTTCTGTTGTGCTCTTTCTTTCAGATCCTCTGTTCGATGCTTTGT
TATAAAGATTTGGGCATTTCAAAATCTTCTCCATATCTGGTGTCTTTCCAAACAGCAGGTCATAGACTTTACACAAA
GAGGAACGACACAGGTTATAAGTAGAAGTGTTTTAAACCCTGAGTTCCTATTTCAGTTTTGCTTTCTTAAACATATT
TTCCTTATGTGATAAATGCGAGTGTTGAATGGTGATAAATACCACCCATAGGCTTTAAAGCCTAAATGTTGAATTTG
ACACTGAGAGTTTAAAGGCATCATGAAAATTTCTCCAGAACTAATGTTCAAGCAATTTAGGTTTTACAGGCAACTCA
ATAGTTTTGAATGATGTAGTTATTTTGAAAAAGTCACCATAAAACGCTATGTTTAGGGAATTGGTACTTTGCATTTA
TCAGAAGATTGTAAATGTCAATCGATTGGCTTGCTATTTGGAATATAATTTTTTAAATTATAGTTCAAATCATTAGG
ATTTAATTCATGATTTTGTACTACAAACTAAATCTATGAAAAATATCAGATATTTATTTTAAATTAGAGGCATGTAA
AGGAAAATATAAATTTTGAAATGCCATTTTACTGGATTTTTCTCTTCAGCCCACCCTAGGCATTTGTTACATAAAAT
ATTTCTGAGGAAGTCTTCCACTGATTTTGTAAACAAACATGTTTTATTGAACAGTTCTTTGTTGACTAGATTAACAT
TGACCATTGTATGCAATGCATTCTCAAAATCTTAGAAGCTGGTTTTCTTTTTAATCATATAATTTTACTTGTTTTAC
AGTGAAATTAATGCATGTAAAAAGTATACCTATATAGAAAGTTAAAAGAATATTGCTAACTAGTTACTATACTTCCA
AATTGCCTATTTTCTGTGTCTTGCATTGGACAGTAGTGATTACCTCTAAAAGAAAATGGATGGTCTTTGTTTCATTG
AAGGGATGGATAATGGACATAACTGGCATTCTTGAGCAATGCAATTGCAAATACATGTCTTTGCATTTATGGTCCAA
TCATCTTCTTACTATGATAGCATATAATTGAAGGTTCAAATAAATGCCTCGTCCCTTCCTGTGGCATATTAAAGAGA
AAGAAAAATTAGAAATACTTTCAAAGCTACCTCACATACTAATGGTAGAGTTGTTTGAGTATTTAGGTGATTTAACA
AAGCTGATGTATTTTATTATGCTTGATCATTGAGGAAAATTTATTTATCGGAATGCTTTTGAGAGCATATATATTGT
CAGAGATAAACACAGCTGGATATTAAAGAGGTAAAAACAGATTTTATTCAATACCTCGTGAAATTAGGGGAGAGCTG
AGATCCATTCTAATTTGTGCAGAGGCGACTTGGTTGTTTTAAGGCAAGAAGGAGGGAGAAGGAGTGGGGGTTCATTC
GAGTTAGAGAAGTAAAAAAGTACAAAGGGCTGGACAGTGTAAATGTGATTAGGCCAGCTGTGTTAGCTGGAAGTTAT
TGAAGTTAGGATTCTATCTTCCCACAGAGAACAGGAGACAGAGGACTTATCCTTCTTGATGATGTCATTTGAAAAGA
ATGGCTTTCAGGTCCTTGAGTGAGAGACACTTCTGATTTCCAAGAGCTACATGTTCACAATTGTAAGCCCTTTTGAG
TAAATGTTCTAAGAAACGGAGGTAAGAGTCCTATCAACAGATGTGTGTTGGCTAGAACAAACATTAAATTTTCCTGG
CAGCACTGAGCTTTCTCAAGCAGGCACTTAAGGGAAGGCTAGGGTCATCCTAGGGACATGGCCTTCTGGGGCTAGAA
ACCATACTAGAGTTTAGTCAAGTCTTAGTGCAAGGGTTTGGACAGAGTTGTTAAGTGCTGAGAGTTCTGTATTTCTC
ACTGTCACAAAGGAAGATCAGAAGCTCCTGATACTTTTTTCATCAGTACAATTGAATATATAAATCCTATACACAAA
AATAAACTAAGCTTATACAAGCATATTGGTCAAGGAATGTTGCTGGCCTTATTAATTAGATAGCCCAGTTAAAAGAA
GAATTTTTTAATATAATTAATGTTAAAGTAGGATGATAGTATATAAAACGTGTCTACTGTCCTGAATACAAACTAAA
CTGTTTGGTTTAGCATTTACCTCAAGATCTCTTAATATCCCCCAAAGGGTCCCTAAAACCACAACTTATCTTTGTGC
TCATGAAGTAGAGAAGAGACAGTTAATAGACATTTCTAGCTGATAGACTGTTGTAGAGCAGAGAACGCTCTGTGTTT
TTGAAAATTAAACATATGAATTTGCCCCTCTTCCCCTATTAAGGAAGAAGAGTTTCTTAATTGTGCGAACACATCAA
GTGAACTATTCAATTAGATTTTTGTGACCCAGGGTATAAACATCTGGTTAAGGTTACATATTTCAAAGGAACAAAAC
ACTAGAAACTCTTGGTTTTAAATCTCATGGCTGGAGGATAATTTGCAGCAGAGATTTATCTGGCAAGCATACAGAAT
TGCTGAGACTGTTCTAAAGATGTAAGTGTGGGTGTTTGTGTCGTGAAAATAGCTGTTTACATCTATTAAGTGGATAC
CGATGGTTGAAAGTGCCGTCTATGTCAAGTTTTTACCAAATCAACTTTTGCCTCACTGTGTCAGACCATTTTACCTA
ATCAACTTGGACTGCTAATGTCCTTTCCCCTGGCACCACTATCTGTCTCTTTTGCAAAGCACAGAAACGGCATGCAT
GATTGTAGTTTATAAAACACATGTACCAATGTGGTCTACAGCTTCTGTTGAGTTCGAGAGGGTCAGTTTCTGTAATC
TCTTCTGGCACAGAGTCAAGAACAGCTTCACTTTCCTCCTGCTACCTCTCTACCCGTAAGTGTGAACCCATCACTTT
GCTAACACTCAGGAAGGGGATTACACAAAATAGAGCAGGAGCCCTCTGACCTGAATATGCATCTGAGCCCTAGCCAT
AGAGCTTCTGATTCAGTAGATCTGGGATGGGGCCTAAATATTTGCATTTTTAAGTGTATAAGTGATGCTGATGCTGC
TGGTTCCAGGACCACATTTTAAGAAATATCGATAAAGGTGGAGAATTAAACTGCAGCTCAGAAGACCTGAGTTCTTG
CCCCAGCTTGACTTTTACAATCTAGCAAATGGATAAAACTCGCAGGACTTCAGTTCTCTTCATCTACACAGTGAGTG
GTTAGATTGGCTTTGTAATTTAAAATTAAACAGGGTTTGATTCTGATTCACTACACAAGGTTCCAAAGAAGGAATGA
TATCTCCTTTCATTTCTTCACTTTGTCTTCTGTCCCTAGGTAATCTTATCTATGTTCCTGATTTAACCTAACTAATG
TTTCTGCAAAGCTTCTAATATTTACATCTCCAGCCCTGAAACTCTCATTTGAATGCTAGTCTTATATACATACCCCC
CTGCCTAATTGACATCTCCACTTAAATGTATCAGAGGCAACTCAGACTCAACAAGGACCAAACTGAATGTTCGACCT
TGTCCTTCAAACCCGATACACATCCAGGTTCCTCCATCCCAGTGAATGACACTATCCAGTTAAGCAAGCCAAAAGTC
TGGATTTTTTTTCCTCACTCTTCCTCACTGTCCGTCAACTACCATTATTAAATCTGTCACCTGGTCCTACTGATTTA
ACCTTCTCAATATCTCTACAGTTTTTCTTTATGCCCATTAGTATCCTAGTGCAAGCTACCATCGTCTCTCATTGGAA
TTAACACAGTAACCCCCCTACCCACCAGACTGTTCTGCCTACAGATAGTGTGATATTTAATAAATATAAATCTAGCC
TTGGCTAGATTTCTCCTTCAAAAGGTTCACATTAATTTTAGCCTTAAAATGGTGTGCAAAGCTTTGCATAGTCTGTC
CTTTGCTATGTTGGCAGTATTTTTTACTATCCCTCTCATCTGCTCATTCTCTGTACTCCAACTACACTAACTTTGTT
TTTTTTTTTTTTTAGATTTCTCTAACTACAGTGCTGTAATCTCTTTTTCCTTTGCACGTACTATTCCGTTTGTCAGG
GAATCTGCTCACTGTCTCCACCCACTCCACACACTCACGTTTTCCTGCCCGTCTTACCGGTCTTGATCGGTTGTCAC
TTGCTCAGGAAGGTTTCCCTGGTCACCCCCTCCACAAATTGAATTAAGTCCTCTTGCTGCATGCTGTCCTAGTGCTC
TTTATTTTCCTCTCCTCATCCTTAATTCAGTTTGTAATTACATGTTATTTGTGTGAGGATTTGATTATTATCTGTGT
CACCCACTAGATATTGGGCATTCTTTACTTACTCACCACTGAATTCATAGAACCACAGTAATTGTACACAACAAATA
TTCAAGAGAAATTTATTGAATTGATGAATGAAAAGTTGTACCTTAACATGTTCCTGACATGTATCCAAAAAAGAGCT
CCCCTTTGGGGTCTATTAGGACTTTGGACCTAGGTAAACGTAACCCTAGTTTCGCTCAGGTTTAAACAGTAGAAAGT
AATTGGGTCTCTTTTGCATGTGGCTTTCCTAAGGGCTAACCCTGTCTTCGGAATGAGTCAATACAGCAGAGCTGTTG
AAAGCAGACTCTAGCTTCGGACAACGTTGGTCCGAATCATGGTTCCGTCATTTCTTAGCTGTGTGATTTAGAATAAA
TTAATGTTTTAAAGCTTTGATTTCCTCTTCCTTAATCTGGAGATGCTAATAAAGCCAACTTCGTAGAGGTATTGCGA
TGAGTAAATAAGCATAATTTGCTGTAAACACCTTGCAGATTGCCTGTTGTATGCTAACTAATCAATAAATTGAAGCT
CTTAACATCATTATATTAGATATTTCCAGCATTGAGTATACTATCAGGCATGTGGTAGAAGCTCAATATAAAGTTTT
GTTAAATTGAATAGATTCCATATATGGTATTTCTACAGCATTATGCTCCTTATTTAAGTGTCTCTAAGTATTTTTTA
AGTATCACCTCACAAAAGACAGATGTTTAATTCATTACACATGTGAATTGTTTTAGATAGAAAATAAAATAAAAAAT
TCAAACATTGAAATCAATAGTGTACCTTACCTTAGGATTACACCATAAAATTTCTACCAATCGAGAATAAAGTGTAC
AGTCTATTTCCTTTCTAATACTTTTAACGCAACAAATGTTTATTGAACACTTACTACTTCTAATCTATGACAGACAT
AAAGATGAATAAAGCATGCCACAATGTTTAAAGGAGCTCACTATATCATAAGAAAGCGGATTCACACAGACAACTCT
ATAAGATAAAGTGGTAAATTTAGGCTGGCCTGTGAAACAAAGGATTATAGGTATAGTTAAGAGGTGGAATTTATTTT
ACTTCGAGGATTTCAGTTACCTTTATATTCTTTGTCTAACCTTTCATGTTTCTCTTTCTTCAGAAACAGAGCACCTT
TTTCCTGACACATTCATTTCCCCCTATGGAGTAGAGCAGTTGTTTTCAAAGTGTGGGTCCCAGATCAGCATCACGGG
GATGGTTAGAAATGCCCATTCTTGAGCCTCACAACAGACCTACTGAAACAGAAATTCTTGGAGAGTGGAGCCCGCAG
ATCTGTGATCAAGCCCTGTAGGCAATTCTAACGCACACTCAAGTTAAAGAACCACGGGAAGAAAGGTCCATCCTGTA
ACAAGACAGATTTTTTTCATTAGCATCAATTTTGATCATTTATATATATATATATATATATATATATATATATATAT
ATATGCATGCTCACAAAACCATTCACCTTACTAGGTTTTAGTATTCCCCTTCCTGTATTCATGTGGTATGTATGTAT
ACAAGATGAACACACATTTACCTGAGACAAGGTAAGACTACACATGTCTCATTTGGGGACCAGAGGCTGTAATCTTA
CTCAAGGTCAAAGCGTCTTCACTGCTTTCTTTCACTGCTTTTCAAAAGTAAAATTTCCATGTAGGTGTCATTTGTTT
TCTTTTTGTGTTTTAGAAAACCGATTAAGGGGTGAAGTCTGGCTAAACTTAGTGTCAGGACATTTACTTAGATAAAA
TTATTTTAATTTATCTTGTAATGTTCAATGTGAGAAGAAAAGTCCTTATGAGTAGTGTATTCCTTAAATAACAACAA
TTTAAAAACTACCACTGAAGTCTGTCAGAGTAGTTTTGCCTCATTTGTCTAGATAAGAGAAAAAAGGTTCACATTAG
GGATTGCAATTTGTCTGCCAAAGTGCAGTTTATTTATTCAGAAACATTTAGAGAGGAATGTGTCAGTTCTGTTGCAG
GCACTGTGCTGTGACGGGGAGCTCAAGATGATCTCAAAAAATTTCACAGATGGGGTGGGCAGGGGGCACAGAGAGAT
GTATTTAGTGGTTCAGATACTATTTAGACTGTGGCCAGCATTTCTCTAAATGCAATCCAGATAACACCTTACAGAAT
CATCTGGGCAGCTTGATAAAAGCTGTAGACTCCTACCCTTCATCCCAAACCTATTGAATCAGTGTCTGTGTGTGAAG
ACCTAGATTGTGACTGGTAATTATACCAAAGTCTTAGAAGCAACTCTAGGCCAGTAATACTCACATCAGAATCAGCT
GGAGGGTTTGCTATACCACAGATTGCTAGGTTAGCCTTCAGAGTTGCTGGTCCAGTAACTTTGGTGCAGGTCCAGAT
TTTGCATTTCCAGCAAGTTACCAGGTGATACTGATGCTGCTGGCCTTGATCGTGCTTTGAAAACCACTGCTTTAGCT
ACGCTATAGGAAAAACCATATAAGGCTTTTATACTGGCCAATGACTTCACAGGCCTGAATTTTAGAAAGCCCCCTTC
TGCAGCTTGGCCTATAGATTCGAAGGAAACAGAACTAACACAAGAAAGCTAGTTAGGAGCTAGTTAAAAATCATCCT
GACTTGCCAAGGAAAGGTGCTGAAGACCTGGGTCACAGAGCAAATGCAAAACACTAGGACTTTGTCCCTAGTTCACC
ATTAAATCAACTTATTTTCTCTTACCCCCTCATATTCACGTTTACTCCTTACTTTGTAGTGGTTGGACAAAAATCAA
ATAAATCTGAGAATTCTAAAATGCACACCCTTGTTTATTTTCTAACTCAAATATGCCACTGTTGTCTGTGCTCTGTC
AAGATTTCAACACATCTTTTTCTCCTGTTTGCTTTTCCTTTTGGCATATAGTGAGTGTGTGTATACACACACACACA
CACACATTTTTTTTGACTCCTTCCAATGCCCTTCTGCTCTCCGCAGATACACTTCTGCATTCTGAATAAAACCGAAT
ACATATATATATATATATATATATATATATATATATATATATATATGCACACATATTTTGAAAACCTTATTTGAAAA
GAAAGCTTTCGGAGGAAACGTTATTTAGCCACTTAATCGAGTCTTTTACTGAGGGACTTTTTGTCGTCCCCTAACTT
CCTGTCAGCAGTCCACAGGCAGCAGGAATAATGTGGGAGAAGATCAACAGGCTTATTTCAGGAGGTCAGGGGCCAGT
GCCACCACCTGCAGGTGGAGACATCAGAAGCAGGAAGCAGCCCACCAGCTGCAGGGAGAACTCCCCACAGAGCCTAA
CCAAGATGAAGGGACTTGTAAATTTCAACCCTCCCTTTTGGCTTTTGTGCTAAAAATGTGAATATTGAGGTCTGCCC
TGATTAAGAACTAGATACATTCCTCTTTGTGACTGCCACACTTCCTTAGCGTATTCATTTTTTGTCTTTCGATCTCA
AGTTATTATTTTCAAATGCATTGCACGTATCTACCATGGATACCATTGCAATTGGAAGGAGCAAACGTTTTGTATGT
TTACTTGACAAAGAGAAGTGACTGCCCAAGCCACACAGAGTTCTGCACAAATCAGTAACTTCTAACGAACGTTTGCA
CTTCCGGGCTTGTTCTCTACCTATTTCAGTCGATGCATTTGTATTATTTACTTCAAACTCCAATACTAATAATGCCT
CAATCAGGTTGCAATTGGGATTTGAGCAGCCAGAATTTCAGAAATTTGGTTTGGTCCATATCTGTGACAGGTCAGTA
AATCAGAGAAGCAAGGGTTTGGTTGCTATTATAATACATTGCTTACCTATCAATTTAGTTATCAGCCAAGGTGGTTG
TTATCATCCAAAGTGGCTCATTAACCACCTTGGAGACTCAGTATACAATTGCAAGTAACCCTGGAAGTTGTAAATAA
TCCCAACTGAATTTGTATGAGTTTGGTAAGGTTAAGTGGAAACCAGCTGCTTAGGGCCTTGATTATAAATGAAGTTA
GGAGTGGAAGAAGTAACAAAACCCCAGGCAAATTCATTAAACATTTTTTCCCTTCAACTTTATGCTCACGAATGTGT
TGAGACTCTTCTGAATCCATAAAACACCTTTCAGCATCATCTGGGCAGCTTGATAAAGGCTGTAGACTGCCTGCCCT
TCATCCCAAACCTACTGAATCAGTGTCTGTGTGTGAAGACCTAGATTCTGACTGGTAGTTATACCAAAGTCTTAGAA
GCAACTCTAGGCCAGTAGTACTCACGTCAGAATCAGCTGGAGGGTTTGCTATACCACAGATTGCTAGGCTAGCCTTC
AAAGTTGCTGGTCCAGTAACTTTGGTGCAGGTCCAGAATTTGCATTTCTAGCAAGTTACCAGGTGATGCTGATGCTG
CTGGCCTTGATCATGCTGTGAAAACCACTGCTTTAGCTAGGCTATAAGAAACCATATAACATGGACAAGGCAAATGA
AAAGGTTGGAATTCTTCTGAATCCCAACACATTTGTGAGCATAAAGTCGAAGGGAAAATGATTCTTCTGAATCCAGA
CACATTTGTTTAAGGATAAACTGTTTTTTCCTTCTGAAAATTTAATGTCTGATTCTCGTTCATTCATTCATCAAAAG
TTATCAACTATCAACTATAGGTAGGAACTGTGCAATATGCTGGTGATAAAGAGATGAAAGACACAGCCCCTCCCTTC
AACCAGCTCCTAGTTGAGGTGGCAAGTCAGCTGTATAATCAAGTAATTGCAAGACTGTGCACTGAAAAGGGTGACCA
CAGGGTGTGATGGCCACCCAGGGCTGTGGAATCAGTCCCAAAATGAAGAATGAAAGCAGGGAAGGGTAATTCAGAAA
GAAGAAACAGTTCGCATAAAGACCCATAGATAAACATCAATCAGATGTGGTTAAGACAAAAGTAAGTTTCTGGAGGC
TGAGGACCTTCTCAGCTATATGTTTGCAGTGCTTGGTATAGGGCTTTATGCATCTACATGGAAGACAGAAAGGGCCA
CATCACAGTGGACAAGGCAAATGAGAAGGAGGCAGTATCAGAAGATGAGGGTACACCGGAGATCCTAGTTATATATG
GGCATTGTGTTCATCTCAGGAGTTACTGAGTAATGGGACCTTGACTCAAATGAATCTCAAGTCTGTTTTTGCCTAAT
CTTGGTTTTAGGACTAGGATTAGCATACAACCGCACTAGGAGCCTAGTTATACGAAAGGCTGCATTGCGGACCTGAT
ACAGTTCAATATACATACTGTCACCTTGCAAATAGGGTTACGTTAGTTCTCAAGACTGCCAATCCTCTGTGCTCTAA
TCCTTTTGGCTTTTTTTTTTTTTTTTTTAACTGTCTCACTCTGTCATCCAGGTGAAGTGCCCTGGGATGATCTAAGC
TCACTGAAACCTCCGCGTCCCAGGTTCAGGTGATTCTCATGCCACAGCCTCCCAAGTAGCTGGGATTACAGGTGCTC
TGGCGCCACCAGGCCCTGCTAAGTTTTGCATTTTTAGTAGAGACAGGGTTTCACCATGTTGCCCAGACTGATCTCAA
ACGCCTGACCTCAAGTGATCTGCCCGCTTTCCTTTGGCTTTTAACACTATAGAGCAAGGGTCCCCAGCCCTGGGGCC
ACAGACCAGTACAGGTCAGTGACCTGTTAGGAACCGGGGCCCCACATCAGGAGGTGAGCTGCAGGGCCGCCAGCATT
ACCACTTGAGCTCCACCTTCTATCAGCTCAGCAGCGGTATTAGATTCTCATAGGATCACGAACCCTATTGTGAACTG
TCCACACGAGGGATCTAGGTTGTGTGCTCCTTATGAGAATCTAATGCCTGAAGATCTGAGGTGCAACAGTTTTATCC
CCAAACCATCGCCTCCCACGCACCTCTCCCCACAACCCCACCCGCCCCTGATCCATGGAAAAATTGTCTTCCTCTAA
ACCAGTCTCTGGTGCCGAAAAGGTTGGGGATTGCTGCTATAGGGCGATGGTTTTCACATTTGATCCTGCATCAAAAT
TTCCAGGTGACTCATTAAAATACTGATTGCTGTGCCCCACTCGTAGGAGTTCTGATAAGGTAGCTGTGGGGTGAGAC
CTGAGAATTTACTTTTCTAATAAGTTCCCAGGTCATGCTGATATTGCTTTGATAACCAAAGCAATATCAGCTTTGGT
TATCAATATATAACCAAAGCCACATAGAGGGGGAGAAGTTCCTTGGGTTTAGCCCAGTGTTTACTGCGACCACCAAA
ATTGCTGGAGCTTAACCATGGCTCAGAGAGTTATGTTCTGTTCACTCTGTAGGCTGCTATTCCCTGTCACCTTTTGA
ACTATGATGGAGGGGAAGAGCTGCCAGCTCAGGAGATTTCACTTTTTTCTCTGCATAATTGAAAATCCAGAAACACA
GGGTTTTGGGAAAGCTATAGAACAGATCATCAGTGATCAGTGTTTAATAAAGTAAAGCAATAAACTTTACTGTGTAA
AATAGGATACTTTATTATATAAATTTTGTCCCCTTCCCCCACCTCACAGGCCAATAAAATAATATACTTCTTGTCCC
TGGGTGTAATGTTATTGGAAACCTTTGAATGTAGGAGAGGCATGGGCTTGTAAGTTGCAGAAAACTGCTAGCCTAGG
ATTGAGAATTTCATGGATAATCCAAAAATAGATGATTTTACAGTTATAAGCCTTACGTGAACTTGAGGTAAGAAAAC
ACAATGCCTTTATAGTCTTCTCAGTTGCTCCACATGCCCTCTGAGATTCTGTTCTGCCCAGCCTCTCTGGTTGTCAC
ATCTCTGGGCATTAACAGAAAGTTCACATACTCTTTGTCTCTGATGATAATCCTTCTAGGTCCATATAGAAGATCCC
TATCCAAACCATCCCCCAAACAAACCTATTGGTTAAATATTTTCTCCACCGAAGGCACTTTCTTAGATTCTAAGTGC
CCTGTAGGCAGGCTTCCTCTCTGATTTGGGAGAGTACAAATTGCGACAAGGTTAAATCATAGCCTGGGAATTTGACC
TAAAATTCACTCTTCTCCCATATGCATTCATGAACCTTCTGCTGGTTTTTAAAAGAAGCTACTTAATGTCAGCTCGA
AGAGGTTGGAAGGGGTTAAAAACATGAGCATGGCAGTAAGAAGATTTATGAAGGATCTGAGAAGATTATGACTTGAT
CAGATGGTATTTTGTCAGCTAGCCACATTTGTGAAGACTTGAAAACTAGGGAGGCTTGTCCTTCTAAGAGGGGGCAC
TGCTGGGACCTGGATTCTGTGGAACCGTATTAGTAGAATAAACAATAACCTTTGCTTGTATCAAATGAACTTCTATT
CTCATGTGTCTTTTGACATATTTTTATTAATCATATCACTGGGACCTCCTTGCTGAAAGATATCTCCGTTCCCCATT
CTGATGACTCCCAACTAGGAGTGAGATCAAATGAAGATGGCATGGACCATTTCTCCATGTGACAGCTCTCTGTGGTT
GCCTTTTAACACTTCTAATGCCCTTTCTCTTAAGAATTCCCATTTGTCGTCTGGCACTGGTGCTGTGATCAATAAAA
ATGTAATGGAGTGAGGCTTAGAAACATGAGGAAATTTACTCAAGCTATCCATTTATTGATGTGTCCATTTGTGTTGT
CAGGGAAGAAAAACTTTTTCACTCCCCTCTTAGGTTCATTACTTGGGGGGCTGCAAATTAAACTGACGACAGATAGA
TTGGCAATAGAAAAGACAAAGTTTATTCAGAGAAGTATGTGGGAGCTCACAGAAAACATAGCTCAATGAAGTTAGAA
TTTGGGGCTTATGTACTATTTTAACAAGGGTTTTGAAAAGAAGAGTGTTAGAATTTCAAGCCACAAAGTTGGTGGGA
AATATGAAAGAAACTAATGAAAGGTAATGTTTGTTTTAGTAAAGTCTGTTTATGTAATTTTCTTTTCCCAGCGACAA
CTTCTCATCTCTGGTGACAGGAGTCACTCTTTACCCCTGGTGCAAGAAACTTTCCTTAAAGGAGGATTTAAAACAGT
TGAATTATTTCAGAAATCTTTGCTTTTAGGCAGATAGGGGGAGTACAGAAAAAGCCCCTTCCCGTATCTGTTGATCC
TCAAATGGCTTTAGCTCAAAACAATTTTTACATCACGATGGCATAATGTAGATCTCTTCAATGTGTTCATTTATTCC
ACAGATATTTGTGAAGTACATGATATATGCCAGGTACTTGGGATACAAGAATACATAAGTATGTCCCTAGTCTCGTA
GAACTTACACTCTAGTAGTGAGCTAGAGAATAAATGATATTATTTATTATATGCATACACATATGATTTCAGATAGT
GATCCATATTGGAAATAAAGCTGGTTAAGGGAATAGAAAATGATATTGAAGGTGGACTTGTTTAGATTGGGTGGATT
GGCATGGCTTCTCTAGGGGGCAGTATTTGAGCAGATATGAGAGCAGATATTCTCCAATTTGGGCAAAAACATTCCAG
GCAGAGGAAACAAGGGCAAGGGCACTGAGTTCAAAAGAGACTTGACCTAGCCAACAAATAGCAAGGATTCCAGTGTA
AGAGAAGGTGGGGAAGGAAGGAGGTGCAAGTATAGGCAAGGGCAAGATCACACGGGATCTTGCAGGCCGTGATAAAA
GAATTTAACTCTTTCATAATTTTGACAGGACATCATTGAAGAATTTAGAAAAATAGAGTGGAGATACCTGATCTGCT
TTCTTCAAAGAGTTCATTCATCATTGCTGAGTAGAGGTTAGACTGAAATGGAAGCAATAGTGAATACAGGGAGATAG
CACAGGAAGCCACGTTACTAGTCCACATCAGAGGTGGTTCAGACTAGGGTGGAGTGGTGGGGTCAGTTAGAGAGCTG
GTATTTAGGATACATTTTAAAGACAAAGCTGACAGGATTTGCTGTGATGAATTAGATGTAAAGTATGAGAATAATTG
AGAATTATTTCTAAGTTCTTTGCTGGGGAAAAGTGGAGGAGGAAAAAGTTAGGGTACAAGGTGTGATGAAATCAAGA
GTCTCTCTTATTATCAGAGTCTCATTAGATATCCAAGTGGAAATGCTGGAAAGAAAGTTGGGTAGATCAGTCTGAAG
CTGAAGACAGATACTGTGACTGGAATAATAACGTAAGAGTTGGCCGGACACAGTGGCTCACTCCTATAATCCCAGCA
CTTTGGGAGGCCAGGATAGGAGAATTACTTGAGCCCAGGAGTCCAAGACCAGCCTGGGTAACACAGCGAGACCTCGC
CTCTACACACACACACGCGCGCAAAAATTAATCGGGTGTGGTGGCACATGCCTGTAGTCCCAGATACTCAGGAGGCC
GAGGCTGAAGGATCACTTGAGCCTGGGAAGTCAAGGCTGCAGTGAGCCGTGATCACACCGCTGCACTCCAGCCTGGG
CAACAGAGTGAGACCCTGTCTCAAAATAAATAAATAAATAATGTGGCAGTCATAGGCCCTTAGATGGTTTTTAAAGA
CATGGGACTGGATGAAGTCTTCTAGGAGGAGAGTTTGGGAAAAGAGCCCGAGAATTGACTGCACCTTTCAAAACAGG
AGGAAGAAAAAAAATACTCAAAGGAGACAAAAGCAACTTCTGTGATTTATAGAGAAAACCAGGCAAGTGGGATGAAG
AAAGTCCTTCATGATAGAATCAAAAACAGTGTCAAATGTTGAAAATACAATTAGACAAACACAAAAGAATAGACCAT
TGGGTTTTGCAATATGGAGCTCATACTTGACCTTGATAAAAGACATTTTCACTGGAAGCATGCATCAAAAAACTATT
TGTGGTAGGTTAAAATGTAGTAGGAGGTGAGGATATACAGACAGTGGCTTTCACTGTGCAGATACTGCTGCTCATGC
ACTAATTAAAAGACATTTGTTGAGTATCTACTATGTTGTATCCATTGCTAAATAGTAACAGCTGGGTTTAGTCAGGT
AGAACAGCATCAAAATCATTATAGTATCCCAAGATAGGTACAGTAAAATCTGTGAAGGAATCAGAGTAGTCTCTTCT
CCAACAGAGCGTAAGACCCAGCTTCACGGAGAAGGTGGTAGATTAGCTCATCTGGGAGGCTGAGTAGAAGCTTGTCA
TTATAGAGGGAGAACATCAGAAGTGTGGACAACAGCTTGAATAACCTTGAAAGGACAAAAGAGGACGGTCTGCCCTG
GAAATATTAAGAAGTCTCACATGATTAGACACAAGATATTAGGGGAAAGGCATAAGGTGAATTGAGTCAATGAGGTC
AAAGAGAAGCTAGCTGGAGGAACAGGCGATCATAAAATGAGTAAAAGTATATATTCAAAGATTCTTTTTAGAAGGGC
TACACAGGATGGATAAGGGGAGAGAGAGAGTTGAGGCACAGAGACAAATTGGAAAGGTGCAATCATAACCAGAGACA
TGAAAAACCCATAGAAATCTGATGTAGATTATGTGGTCCCCAAGGTTGAACAATTAAGTACGCTTTCAGTTGTTATG
CCCATGATATTAACATATTTTATAACTGCAATAAGTGCTGAAGCTAAAGATAAATACAAACAATGTAATTCTTATTC
TGTGAGAAAATGTTGTAGCTGGAAGTTAAACATGTTTCTTAGCTAAAGAAAAATATTGTGTGATCTGGATTACTTAA
TGTTATAATTTAGCAACAAAATGTTGACATTGAGCCTTGCATAATCAAAAAAGTAGTCTATTCAATAACCACATTCT
CAGAAAAAAAACAAGAAAATATTAGAAACAATGATAAATTATCGTAGTAATTTAATTCAGTATTCTATTGTTTTATT
TGGATTTAGGAAAGGCAGAAATGTTGAAATATTAATATATATCCCTGTAATAATATAATTTGTGTCTGAGAGGTAGG
AATGAGGGCATGAGGTCAAAGTTTGATAATGAACTTCAAAGCTATAACTATGATCAGGAAATTAAAATTGGACAATA
AATTCCTAGAATCGTCAGGAGTTGCTTGTGAAATCGAGAAAGGAAAGGATATACACAAAAATAAAGAACAGCCAATG
CTCTCAAAGGAGTCTAACTTTTATAATAGTCTTCTGTGTTAGAGCTGAACTCTTCTGGTTTAGAAGGACACTCTGTT
GCCTGGAAATAGGGCATGGAAAAAGTCATCAGAGTCATGTCATCTTTCATTCTTCCCATGAACGAAATCGAGGCCCT
GAAAAGTCACCTGTGTTTGCTGTATTTTATTGCAACTAAGATGTGCATTTTTAAATTGATACATAATAATTGTACAT
ATTTGTGGGATACATGTGATATTTTGATGCATGCATACCATGTGTAATTATCAAATAAGGATATTTCTGTATCCGTC
ACCTCAAACATTTACCATTGCTTTGTGTTGGGAACATTTCACGTATTTTATTATAGCTATTTTGAAATACAAAATAG
ATTGTCATTAACTATAGTCACCCTACTGGATGCACCTTGTTTTTAATATTTCTGAAAACAGATACGTCTCATAGGTG
ATGGTGTCACAGCTGTGCATTAGTTATTATTGCCTGTGCAGGTGCAAACGTAACTATTCATATTGTTGTCAATTAAT
TAAATAGTTACATTTATTTATATGCGTTTATTATACTAATAAACACAATATTGAGATAGTTGAGCTCTAGTTTTGAC
TCTGCTGTTAACTAGCTGCGTTACTTTAATTTACTTAACTAATTTGGCTTTCAAATTCCTGATAAGTAAAATTACAA
CATGAGTTTCTCCTGCTATAATAGCCTGAGAAATCGGTGAAACACATGAATTCAGATGTTGATGCTATTTAATAGCG
GGATTCCAGATATCTACTTGCCATTATGGGAGGGAGAGAGGAGGTGGACTGGAGGCTGTGATTTCCCTAGGAGGTTG
TTAAAATTGGCCAGGTGAGGAAAGCTGAGACAGACCATAAATATGAAGCATGATACCTAGCCCTCAGTGTTGAAAGA
AAATCAAATCTCATCTTTGTGGTCTAAATATCAGTATGATACAATCCTCTGTGTAGACATATCCTCTGCCCTATTGT
TTTCTTTCTAAAAGCTAAAGCCCAGGTGTGATCACATCCCTCCGTTATTTACAAATTTCTGATGATGATGATTCTTC
TAATATCTACATTCCTTACCATTACCATGATGTCCAAAACCTATTATAATCTATTCGTCTCCAAGTGCCATGTTGTG
GTCACCCTATGCACCCTCTAAACCCACCATATGACCTTCCCGCTGCTACTTGAATACAGTTGGCCCTCTACCTCGTT
GTGTCTTTGCATTGCCTATTTAATTGCCTTTCCATTCTCTAAATCACTCTTTCGCTGGACCAGCAACATCAGCACCA
TCTGGGAATTCATTAGAAATATAGATCCTCAGGCCTCATCTCAGACCTGCTTGATCAGAAACATTGGAGAGTGGAGA
TGAGCAGCCTGTATTTTTATCAGCCCTCTAGGTAATTTGATGCACACTAAAGTTTGAGAACCACTGGTCTAGAGCAT
TCTTCTTTAACTCTCTTCTAAAAATTATTAGAATGAATTCGAGGGACGGGATCTCCTTGAAAGCCAAGAACATTTCT
TTGTCATCTTTCTGACTTCAGGGCGTAGTACACTTTTTGGCCCATAATTAAAGCTCGATAAATGCATTCTATGCCAA
TAAATCAGCTAATCAAATATATTATTCATGCCCTTGAGGTATCTGAAATTTGTTTGCAGAATGTAATATATAACTAT
AGAGTAACAAGAGAATAATTTATTGCCATAGATAATAAAACAATATCCTCTGTATAATAAATCCTAGCCTCTGCTCA
ATGGGCAAAAACGGGACTGGGGTTTCAGATTTTAAAAAGATTATTGGTAATTAAATCACCTGGAGAAGCACTTGCTG
CAGAGATGGGACTTGAAGCATCATAATAAACTGTTGTTTATTATGATTCGGTCAGAGCTGATGGAATCACAGGGATT
GTGTGAGGTATGGAAAGTGGTTGACATTGAATTCCAGGCTGCACAGTTGGGACTTGATATGATAACCAAAAAGAAAG
AATGTCTGGGGTGGTAGCAAGCTCTAAATTTAGACAATCTAGGCTTATCCTAAGGAGAATATAGATACAGATAACTG
AAGTTTGATTAAAGGGAACCTGGTGTATCACAAATAGTAAAAAGCTGTAGTTAGTCTATGCAGCTATCAGCTAGCCA
CATAATACTTTTGGGCAAATACATTATAAACCAAAAGAATGACATGGCTTATCTCTGTAACAAAGTGGCTCATTGTT
CTTTATTCTACTGTTATCCTTAAGAAAAAAATTTTAGTAAATTTGTTATGCTATACTCAACTTCAAGAAGGGATAGC
GCTTATAAAAAAATTGTTTAAAGAAACAGGCCTATTTCTCTTTGGGAGAAGCCACGGAGAAACGAAAAGAATGGAAC
GTGTGTTTCTGCCCAGATGGCAATAAAATGTAGGGTAAATTTCTGTCTTTTAAAACTGTATTTTTTCCATCCCTCTG
TATATACACATATCCTAGGACTGTTATAAAATGCTGCATGCGTATGTGAAAATGGAACCTTATTGGGCTGTTTGATG
GACCTTTAAAATATATTTGTTGGTTTGGGGTACATACTAGCTATGCAATATAATCCGCATTATTTCTTATGTAAACA
ATGGATAAACTGTTTCACAGTCCAGACATTTATTTGGTCACTGTTTGTAGAATGTCTATTTTATTTACTTCTGAATT
TGTATTCCAGAGATCTGCCTTCAATGTTGGATACTTCCACTGTAATATTCTAGGAGATGCTCACTTTCTTTTTCAGC
ATCTGACACAGTACCATCTGCCTCCTCTTTTCTTGCCACAAGTAATAACAATTTTATAAAGGAGGATCACATTACAG
AATTATAGGTGGTAAACTTTCTACCACCAGATTTACCCAAGAACCTGAAACACATTTTTTCAAAAGGAAATAGAATG
TCCTTCTTGTGACTACATCGGAATTTTGCTTGCAGCATTATGCTTTTTTTTTCCCCCTAGTGTAGCTAGCCATGTGG
AACTGAAGCCATTAGCCAGCTCCTCATCCTATAAATGCTATTACCTGGGAAAAGAGGCAGAAAATATACTCTCTTCT
CCAGTTAGAGTCTAAAGGAAGAGAACAATATGGGTAGTTGTGTTTACCACAAATTGATAGAACTCCTTTATTTTAAA
TGCTAAAACCAAATAACTTGTTTATATGACTTCAACATTGACTATCACACACTGTTGCATGATAACAGAGTGAAAAC
TACCTCTATTGGATTTAAGTGGGGAATCTATGTCTCATTCTCATTCTTTTTTTACTGTGGAAACTAGTTGATTCCAG
GATCAGCCTTAGCTCCAACTTGCCACACTTTGAGTTTTGGTTTTTCACTTGCATTGTCACAGGAAACTTCTATAGGA
TAAATCGAGGAAGATTTTACTCTGCAACGTGTTGCAGAATTAAACATTTAAAGTGGCAAAACCTTCGTGTGTAGGTT
GTCTCCCCAGAGAATGTAAAAATGAATTGAAGGCAGCACCTAATAGGTAAACGACAGCCAATCAAACAAGAACAAAT
GAAATTTGACTGGCAAAATCAAATTGAAAATGTATAACGCTGAATCTCAGAATATAGGAGGATGCATAGAAACTAAG
CTGTACTATTATAAAAGTCATAGCCATTGAAAAATAATGACTGGTTAATTTGGTTTTCTTTACCTCATGGATGTGAA
TGGTTAGATTTTGATGTTGGTGTTATTTGACGTGTGTTTGTCAAGAAGTTGCCTTAGTCGGCTCGCATTTAGGATAA
AAAAAATATTTTAAGAAATGTTTAAGAGATTATGTTGGAGACATTAGAAACAAAATAATTATGCAGAGGGCAGGACT
ATCAAAATATAATAGAAAAATTACACCGCTCTTTTATGATTTCCTCCTTTTTGGCATTTAACACAAAACTTTATGAT
TACACACACCACGCACTCCAGAAATGCTTAAAGGAAGATGAGAGGAAAATTCAATAGAAGTAGCAGGCATTTCTGTG
AGGACAGCAGAATGATCACTTCATCTCTGTATTTTTTTTTTTTCAAATTTCTGTATCTGTACAATGTCTTTTCCAGC
TCTAATATTCTGTGATTTGGTAATTTCCGCACTCAGATTTTCTTTAATGAATTTTGTATGATATTACCTATTTTTAT
ACCAGATATTACCTGGCTCTAATTTCTTTTTCACCCTAGGAAATAAAAGTATCGGGTGAATTTCCCATTTTCTTATG
TTATTGATACAGGTCTCTGTTGGATATCCCCACGATTAACTTTCCTGCAGCATGTTCGATGGTGGCTTAAAGAAGAA
ACCATGTATCAGAGCCCCTTGTCTATATAGACTTTTAGATAAAGAGAAATACATATCACAGAATTATTCTGGGCGCA
TAGAGTCTCTAAATGCAAAAAAAAAATTGTATTGTAGCTGTTGATTCTTCTCAGATAGATTGAGTGTAGAGAGAGAG
CATTCCAAAAACTGAGCAGAAGAAACACAGTCTGAATCAAATAACATGAAATTTTAGCTAACAAGTAAATAACACTT
TTTTCAGAATATGCAAATAATATTGGTTTATTATGAAAAATGTATAGGCTGATAGATGAGCATAGAGAAAAAATTAT
AAATATCTTCTTTAATATCACTTTCCCCAGCAAACCACTTTTAACATTTTGATACATTTTCATGTTCAAACATTTCC
TAATAGTCTTTTTTCCTGTTATATAAATATGAATTTTAAACATTCGTATGTTTATGAAAAGGCAATAAGATACTGCT
CTTTTATAACAGGCTTTCTGAACTTCACAACATGCAGTGTATTCTAACATGCTCCTTGTGTTCTTAACTAATAAAAA
ACCTCACGTTATTTAAAAAACCATCTTAAACATAATTATCCATTAAGAGAAGAGGTTGGGGTAGAGAGTTTCAGACT
ATCAATATCAAAGTTATATTTTCTGTAAGTATTTTAATTTTTAAGTGTAGCTATAGGTATATGATTATAAAACCAAT
AGCAGAGAAAAGATACCACCTTTGAATATAGTTTTCCTTGGTTCCATGAAAATGGCCTCCTTTCTTTTTGCCAGTCC
CTCAGTATCATTAACTCATTTTTCTGTAAATGCCATCATTGTATCACATGTCCTCAGGAAAAGGCACTTTTCTCTTT
TAAGCTAGTGTTTGTTCTTGTTCTAATTTTATGGCAATTTAACGAGTAACAATCCTGTTTCTATAAATACTGTTTCC
TAATTAATCTATTGCATTCTATCCATGAGAATTTAGATGACTTTCTTTGTAAGAGAAATCTCTGTAGCATGAGATTC
TTCTTTGCTCTTAAATTTCATTCTTTCACATTTTTAAATGACCTGATAGTATTTTGTTGTATTTGTGCTGATTTTTT
TTAACCAATCTTACCTTGTTGAACATGTAAGTTGTTTCTAATATTTGCAATGATCAAAATGTGGATCCAACTTCACT
AAAGCGTTAAGAATCTAAAACAAAACAAAGAACAAAAAGTTGGCTGTCATCTTGCTTGGACCACCCCGTGAGTTACT
ATTTTCTTGTTTCCGGTCACAGTTCATCCTAAATCATTTCAGTACACAAAATGTTTTTTAAAGTTTGGGACAGGGGG
TAGAGAATGTCAATTATTCCTCCAAGGCAGTCATATGAGCATTGAGTATCATGTGGAATAGTTGTTACTTGTAAAGT
TATGGGGCATCAAACCCAGTCAATATGTTTCTGGAATTGAAAAAGTCCCTGGACATTCTAATGATACTGTTGTTCAC
TTTGCACCTACTGTTACCACTACTTTGATCTGTCAACACTGCCCGTAATGGTTAATTTTGTGCATCAACTTGACTGG
GCTACAAGGTGCCCAGATATTTGGTCAAACATTATTCTGGGTGATTCTGTGCAAGTGTTATCAGATGAGATTAACAT
TTAAATTGGTAGACTGAGTAAAGTAGATTGCCCTTCCTAATGTGAGCAGACTTCATGTAATTAATTAAAGGCCTGAA
TAGAAGAAAAACACTGACCCTCCCCTGAGCAAAAGGGAATCGTTCTGCCCGACTGCCTTCAAACTGGGACATGGGCT
TTTTCCTGCCTTCAGACTTTAACCACAATATTAGCTGTTCTTGTATCTCAAGTCTGCTCTACTTCGATTGGAACTAC
ACTATCAGCTCTCTCGGGTCTCCAGCTTGCTTGTTCACCCTGTATACCTTGGGAGTTGTCAGTCTCCATAGTTGCCT
CCATAATTGCATGAGCCAATTTCTTACCACATACAAACACACACAGAGACACACACACACACACACACACACACACA
CACACATATAATTATATATGTGTGTGTATACATATTCTCTTATTCCTTTTGTTTCTCTAAGGAACCCTAATATACTC
CTTATTACTCTTTCTACTGCCTTAGAGATCTTCAAGGCCAAGAGCGTAATCCTCCATCCTGGCTCTTTTTCCTAATC
ATTAATGATCAACTCATAGCCATTTAGCTCAACTAAAAATAATTTGTTCATGAAGCTTTACACTCCCACATACTGAG
GAACGTGGTACCTAAGATCAAACAGTCACTGCCTCATCAAATGCATTCCTCTTCAACCCCATACAAATGTCCCCAGA
TGGAACTCACACCATAAAAATATTAGATCCCATTGACTTTTCTGCTTTCTCAAGGATCATTGCAGAGCTTGAAAAAG
ATGGCTCCTCCCTTTGCCTAAGCAGGTTAACTTGGTGTAAAAGTACATGTAAGATTTGGCACAAAGGAAAATAAATC
AGTTTTGCCTGGGTCCTAAGAAACATTTCCCTCTGCCTCATGGTAATTGTACCTGCCAGTTGATTGCATTACTCAAG
TGGAGACCATGAAGTGAAGTGGTAGAACAAGAAGAAATCCCTATAATTTTATTAAGTATGGTGAAAAATACAGATAT
GTAGAGAAATGACTGGGATTAGATGGAGCAAAACATAATTCGAGATCCTGATACAAATTGTACTTCCTGGCTCAAGG
GAGGGAGCAGAACATTCCCTGCTACATGGGAATAATAATAAATGCCTGATAAAAATGCAGATATATCATAGACTACA
GAAGCTGAAGTGGATTCTTATGGTCCCCTACTCAGACAGCCTCTCCTTCAGATGAAGAAACTGAAGCACAGAAAGCT
CATCCTAGTGTTTCATATTGAAAAACCCATTCAAGTCTATTTTAATAACCTGTTACCAAAAATGAGGGAAATAATTT
AACTTTAATGTTTCACTTTGCATTACCCTTTTCCTGACTAGACTTCTATCCTTTTCTTGAGTTGAGCTCATTAACTA
CTATGAAATTATGGTTATGGGTAGAGGTTAATTTTATACCTGTCCATCTTCTGGCATCTTATTTACACTAAAAATCA
TTTTTAAATGGCTTCATTTTAAAAAATATTATTTCAGTTGACATTTTAAAAGACACATCATTTATGTACTACAGAAT
ATGCATTTTATACTCTCCTTTATTAATTTTATTATTTTCCAGGTAGACCAATCAAATGAATCAGAAATTCTTGGTTA
GATCTATTAGACAGCATAAGTATGTTTTTCATCATTAAATTAAGATGAAAACACAATTTTACTTTAAAGTGTTTGAC
GTTTCCAGCCTTTATAAAGTCAACACTTAATCACATCTGAAATTTGCAGGAAAAAATTTTGAAAGCCTTCAATTATT
AACATTATTTCGGGAGAAAAAGCCACTTTGCCGCAGAACTTTCACTTTTCTCTCGTGAATTAAGTCTGATACAAATT
ATTCATTATGGTGAAGTTTAAACATAATAGAGTCTAGCTACTTCCACAAAAATACTATTCAATGAGTTTCTACATTG
ACATCTAACTGACCTTGTAATTAATGTTGTACACGATCCTTTTATTATATGCTGGATTATCAAATATGACTTATTAG
CAGTATAAAGACACAAAGTTCTGAAATGTAATTTATAGCCATGAAAAGGAACTGAGCTTTGTGTGACAGTTAAATTT
GAAGAGATCAGGTGATTATTATGAAGCATGAATAATAATGCATATTAAACTCACGTTTTTGTTTAAATCATTAATAT
GATTGTTTTAGAAGAAAGTCTACCTCTATCATATGGGCAATAAAATGTGTATAAGAGCAAACATTTGTGTATGTGAA
ATAACTCAAATTAAAACCAGTTTTCCACATTAATTCTTACAGTTTTTAAAATTTAAATCATTTAATGTATCACACAT
AGCTTTATTCATTTTAAGCTATAAATGTTACAATTTCTGTTTAAGCTGTTAATATAAGCTTTGTAAGAGCAATTCTG
TATAAATATAGAATTGTCATTATTCACTAATAGCTACCATTTATTTAGTGCTTGTTGAGTGCAAAAGTACTGCACTG
AGATCTTTGCATATGTTCTCTTAATGTTACAATTCTTACCTGAGGCATTTCTGTTTCTGCTGGAATATGGTCTCTCT
GAATTGAACAAGGGAGGCATTTTTGGTTGTTATGATGAAAGGTGGACACTGCTGGCACTAACGTGTGTTGGTAAGCG
ACTAGACTCTTCATGATGCGTAAACAGTGTTTCCTCATACCCCTGCACATTCAAATAGAGGAAAACCTTGTTTATAG
TTAATTTCCCCTAGAATGTAAATCCATTTAACATATAAACACAAAGCGTGTTTTGTGTGGATGTTTTTTACTGGAGC
AGGGAGACAGGAGAGGAAATGCAGTTTTGATAGTTGCTGAATTTTTCAAGAATGCAGCAATTATAGAACAATTTCTA
GAAGTTTCCTAGGAGCTCTTTTCCATAGCAGAAAACTAGGACTTAATAGCCTTGCGACTCATGGTACTTGAGTGTTC
CATACAACTCACCTATATTCAGGGGACATTTGAAAAATTCTACATTAAAGGGGATTCTTAACATAGGCGCAAGTGTC
TGGCATCTTCAATAGGTCTTCTGGTGTGGCCATGAAAACATTCACACGTTTCAAAGTATTTTAAAATAAAATAAAAC
ATATATTGTTGTGTTATGAATTATTTTCTTTCTTTTTTATATGATGGTTAGATCACTGTGCAGACAAGTTTATGAGA
TCTATTCATTTCATTTCAGGGTGGTAAATGAGGGTGTTACTAAATGTTGGTTCTAAAAAGGGAGACATTGGGTATTA
CAGAATTCAGAACAGCTCTAAGCCCTGTGCACATTTAGCATTAGAGGACACAGGCAAATCTGGCCTCCAGTCCTGGC
AGCTTCTTCACTATGTATATGATGTTGGGTGGGTTGCTTTACCTCTCTAGTTTTTACTTTTATTTCTAAGCTAGGGC
TATTCATAGTTCTTTATCATGTGGTTACTGTGAAGTAGCAAAGCACCTGACATAATTAGAGCAGATAAAATGCTCAA
CAAATATTGCTTATCAGAAGGATTATGTATTACCTCCCGAAATACATCAAAAATATATTTTCCAATTCAAAGAATAT
GTAGTACAAAAATCATGCCTAAATTAACAGAGTTGCAGTAGCCCAAGGAGAGAAGATAATCATTATTGATTTCTTCT
TCCTTTTTGCTAAGCAGTTCTCTGTCTCTGCCTCCTCAGTTGTTGTCCATCCCACTCCCCCACTCCCAAGCCCTGAA
CTCTGAGGGGTTTGCTGCCGTGGCCGGTTCTGTAGTCATTGCTGTCCAATGATGAAAACACAAAATACTGCAACAGA
ACACTATGCCTGTCAGCTTAGCTCCCTTCTTTCTGCTAAATGACACTCAATCCTATTCTTTTGTTCTAAAGGATATC
CTAAATGAATAGCCACTGGGGGGAAAAAAGGTTATATAAGATTGTGCACTGTGTGAAACTGATGCAACCAGATCAAT
GATGTGAATTTCTCTTAACTATTTACTGGGATCTAGAAACAGGTCTCTCAACTTAGCAGTGTTTACGAATATAATAG
GCCTTCCTTATACATACATCTGAAGCCAATCTGAGTCAGGAAGAGTCGTGGTCTGATAAATATTTTGAAAACTTGCA
TTTGTTCTATTAAAGCAAACTGTTTATTAATAGTGTGCCTTATTTTTTAAAGCAAAACATTTATAAACAGTAGTCAT
TACAGGCACTTCAGTGTACGGAGTGATCAATTGTTAGACCTTTAGGAATCGATTGTTTCGTGGAGCTTCGGCTTATA
ATTGAAATGTCATCAGAAGGAGTGTAAGACATAGCTTCAGGAGAGGCCATTTATGCGCTTTTGTTTTCAGCTAAGTT
ATAGAGTCATCATGTGAAGAAAGATTCTTCTCTTAGTAAAAATCCTTTAATGGTTGGAATAACACTTGATATTTAAT
ATTTCTTTCTACTTTATATCCACATTTATTCAAGTGCTAACGCGTGTGGGGCAGCAATGAAGCACTTTATTCCAACA
TTATAGTTCTCATATCTGCGTATGATTATTTTTCATTTATCGTTAGCATATATATAATGATGACTTTTAAAGTACAC
TGTATTATATTCACTGGAATAATGATTAGCTATTAATAATTTGAACACTATCCAGGAAATTACTGAACATGTCCTAC
AAGATAAACCTCGTATGATATTGTCTCCAAATAACAGTGCTAACCAAGAAGAGTGCTACCAAGTTCAAAAGTAATCA
CAGGGAGTAACCTAAATGCAGCTCCGTTGGGTTAAAAATAGTTTCTCTAAATTATATGTTCCCTAAGTTTGAGATCG
ATTTCTACAAGGGGATAAAATGTTTTTATAAATTCTCAGTGATAAGTCATGTGATTAAGAACCCCCAACTTTTTTTC
CAAAGACATTTGCATCTCTGATCAAAATAACAAGATCCAGTCTTAGTTATAAATTGGGGAATTTTCATCAAAATAAG
GAGCTACTCGTTGCATAAGAAGACTAGTACAACTTAAAGCCAATTTAATTTCAATGAATGCATGATCAGCTCCATTG
CCAATTGAGTGTTTTTCTTATTCATCAGAAGATGGGTTCATCATCGTGTTTCATATCAACTGTTCTCAAACCATATT
GCCCATTTAAATAAATATAGATTTGTCTCGAAATTCTAAATTCATGTCATATTTCATAAATAGCCTATGGTCCTATT
TATTACTTTAAAATATTATAGATATAATATTTTTATTCTAAAGTAACTGTGTTATACAACCAAATTATTCATTTAAA
TATGTGACTTTTTAAATAAGTAAATGACTTATTTAAGTAAAGTCATTAAAATTTTCCAGTCTGTCCTTCATCCACCT
GATCTTTGAATGAGTTAGGAACAATACAGGAAACTAATACAAACTTAATTTTGATTACAAAAGATGAAATCATTCTG
TTATTTATTCAACACACTATGTGTCAATAAAATCTTATACTGTGAAAGAATTCGTCTAAGTCCATTTGCTGTTGCTT
GTAACAGAATACCTGAAAATGGGTAATTTACAAAGAAAAGGAGTTTACTTCTTACAGTTACGGAGGCTGAGAAGTCC
AAGGTTGAGGGGCCACATCTGGTCAGAGCCTTCTCCCATCCAAGTACTAACCAGGTCGAACCTCACTTAGCTTCCAA
GATCAGATAAGAGTGGGCGCGTTTAGGCTGGTGTGGCTGTAGACTTGTTAGAGCCTTTTTGCTCATGGGGACACAGC
AGAGCCCTGAGGCAGTGCAGGACATTACATGGCAAGAAGGCTGAGTATTCTAATGTGTTCATGTCTCTCTTCCTGTT
CTTATAAAATCATGAATCCTACTCCCATGATAACCCATTAACCTATTAATTTATGAATGGATGAATCCATTCATAAG
GGCAGAGCCCTCATGATGCAATCACCTCTTAAAGGCACAATCTCCCGGTGCTGCCACGTTGGGGATTAAGTTTCCAA
CACATGAAATTTGGGGGACACATTTAAACTATAGCAAAATTGTAATAAAATGTTATATAGAAGCAATGTTCTTACTG
ATTATAATTGTTATATTGGTAAAGTGTTAAGTCCTCTAACCAAGGGATATATTTCAGCTTATTATAATAGTTTTAAA
TTTACAATTCAATATGAATAACATCTGGTAAAAGTTCTTTTCAAGAAATGGGAAAATTAGAAATGTTTAGAAGAAAA
TAATTCAATAAATATTAAGTTCAAACTGGATTCATAGTTTATGTGAAATTCTGGGAACCAATTGCAAGGGGAGAAAA
TAGTTACAATAGCAATGGTGAGGATGAGAATAAGAGCAGGTATCAACGTTAATTGAGGGTGTGTTATAGTTCTAATC
GTGCTATGCCCACTACATGACTTTTCCCTGTGTGAGGTTTCCGAGCTTCTTCGTAGTAATCCTAAATTGAGCTGGAG
AGAGGCTAGGGTAACTTACTCACGCTCATAGAGCCATAGAGTAGTAAAACCTGTATTTGAACTCTGGCCTGTCTGAC
ATCATTCTGTGGTCTTTTAAACCACCACTGCTTCTCCATATTAAAACTCCAAATCTAGGTGAAAAGAAGAAAACTCA
GAACATGTTCTGCAACAAAATATAACAAAATATAATGTATATAAACACTTATACATAATATCACTAATATCTTTACT
ATGAAAAGACTCTGATACGAACATTTTACATAATTCATGCAGAAGTGTTAATCACATTGTCTGTGATGAGCTGTGTA
TGTATCTGATAAAATTCTGGCAACCAGACATCAACTCGTAGGCATAGATCTGTAACACTAAATATTTGCCTCGAGAA
ACTTAAAGAAATAAAGACAAATGAATGAATAGGAACATGGAACTGAGTACAAGATAAAATCCTCCTAAAGCAATCGA
TGTACTTGCTGCTGCGTTATTGTTCTAAGCAAAAGAAGCATGGCGAAGGGAGATGTGAAGCTAAAAACAGAATGCTT
AGAAGGAGATGATAGCAGGAGGGAAGCAAAGATGGGACCAAGCTCCCAAAAGGCGGGCTTTGAACAAACAAAACAGA
AAGCTAAGCCTTTGACGGATGCACGGGATGCAAGAAACTTTAGTCAGGAAAGAGGAGGCGAAGAAAAACCCTCCAAA
GAAAAGGTGAACAATATTTTAATAGGCAAATTGACAGATAGCAAGAGATATATACCATGCTATGTTTTCTCATTGCA
GCTGAAGACAAACTGGGGTTATTTATGCTTTGAAAAAGCGTAAATCTAAAAAACAATTGTGGAGGAAGAAGCGATGA
AAACACGTGTTAATACAGAAAACATGGCTCCAAGGCTTTAAACTTCCTTGTGAGATAAATGCATTTACATTTTCCGT
AGTAGCTAATATATATATATATACATATATATATATATATCTGGGAAAATAATACACAGTGATTTTCTTTCTTTTTT
TCATCTACTTATGTGAGAAAAAAGTAGGCTATCTGAAAGCTTTTCAGTTAAATGAGGAAGAAAGTTAGGTGATCTTG
TAAATAATATATATGTTCAAGATAATGTAAGGCCCTTGTGTAGTTTTCAAAACTTATCTTTAATAGCAGTTTCTTCT
GGGGATGGGGTAGTTCAAAGTTGAAATGTTAGAAAGATGTTAACTTTTTTTCCTTTTTACTTCTCCCTTTCAGGATG
GAATTAACAAATTTGATTACAAATAGATCTCAGAGAGAGGCAAATGCATTGAATCCAGAAGTAACATAAAATTAGAT
CATGTTTAGTTATGCCCGAGGTCACATGGTGATAAAAATGAGGATAAACTGAAATTGTCTGTGAGCCAGATTAGTTT
ATTTTATGCCAGTCCTAGGAAAAAGACACATCATGGTAGGATACATCCTTTTTTTTTTTAATTATACTTTAAGTTTT
AGGGTACATGTGCACAGTGTGCAAGTTAGTTACATATGTATACCTGTGCCATGTTGGAGTGCTGCACCCATTAACTC
TTCATTTAACATTAGGTATATCTCCTAATGCTGTCCCTCCCCCCTCCCCCCACCCCACAACAGTTCCCAGGGTGTGA
TGTTCCCCTTCCTGTGTCCATGTGTTCTCATTGTTCCATTCCCACCTAAGAGTGAGAACATGCGCTGTTTGGTTTTT
TGTCCTTGCGATAGTTTACTGAGAATGATGTATTCCAGTTTCATCCATGTCCCTACAAAGGACATGAACTCATCATT
TTTTCTGGCTGCATAGTATTCCATGGTGTATATGTGCCACATTTTCTTAATCCAGTCTATCATTGTTGGACATTTGG
GTTGGTTCCAAGTCTTTGCTATTGTGAATAGAGCCGCAATAAACATATGTGTGCACGTGTCTTTATAGCAGCATGAT
TTATAGTCCTTTGGGTATATACCCAGTAATGGGATGGCTGGGTCAAATGGTATTTCTAGTTCTAGGCCCCTGAGGAA
TCGCCACACTGCCTTCCACAATGAACAGACACTTCTCAAAAGAAGACATTTATGCAGCCAAAAAACACATGAAAAAA
TGCTCACCATCACTGGCCATCAGAGACATGCAAATCAAAACCACAATGAGATACCATCTCACACCAGTTAGAATGGC
AATCATTAAAAAGTCAGGAAACAACAGGTGCTGGAGAGGATGGGGAGAAATAGGAACACTTTTACACTGTTGGTGGG
ATTGTAAACTAGTACATTCTTAACATCAATTTATTCCTAAAAGCAATGTTCATAGGGCACACTGTAGGCCATAGATT
TGCCTCACAAATTTAAAGGCCTAAGCCCTCAACATGCACAGCAGTATACTCAGAGACTATTTGTAAAGATGACGATT
CTGGAACTTTTTAATGACCCCAATCATTAGCAATGATTAAAATTAATATTCAACATTCTATATTTACCAAGGCAATA
AAGTAGACTAATCTATTTTAAAAGGGTTTTAAAATGAAGAGATGAAACAAACCAAATGATTTTGATTTAAACTTCAT
GAAAACATAAGTTGCATTAATCAGGTGATTTTGTTTTATGAGCATTCTGATTGAAGTGATCATATTTAGCCCCGGGA
GAATAAGAGAAGGTAAAGTATGGGTATGGCACTGAATTTACTGAGATGATTATATTGTTTGAGTTAAAGAACTTGTA
TTAAGAAACAAGTATGTGCCAAACATTGTGCTAGGAGCAAGCAATGCTAAAATTACATGGGTAGAAAGAGAGAATGA
AATATCTAGAATGAGTTAGAAACATCAGTGTTTTCCAATGTGGAGCCCTGACTTCACATGAAAATTCTCATTTTCAA
ACAAGGTAGTTTATGAAAACTGGACTATTAGCAAGACAGGGTGGGCATGCCATCAGTATAGTACCTGGTGTAAAACT
AGAAATTTTAATCATTTGTGCTTTCATTTTATAATCAGTAAAATCCAAGGTAGGACAAACTTTTACTTTTTCTGTAT
AATGGACTGATATTTGAATTATACCCAACTTTAATTTTTTGCCAGAAATTATGCTTTATTGTTTCTCTAAAATGGTA
CTATAGATCTTTATTTATTTCTATATATTTATATGATTTTTACATATATGTGCATTTACATGTATATACATCCATAA
ACTATATACATATATACACATAAATTACAAATATGTGTACCTACGTACATATATATGCATATATCACGCAAATACAG
GCACATTTTCAATACCCCTTTTTGATTTTTTTCCTTGAAGAGCATAGCATCTGAATTTATTATGGATTTATTTTTAA
TTTATGGTCATGTTCTTTGAGTGCTTTTGGTGTTTATCTGGTTGCCCCAAACTCGCTAGCATTGTAAAGAAGATGTG
CAAAGCCTGAATCTAGACTGACTTTCATATTGACTTTATTAGTCAAAAAAAGTAGATGAAAATGTAACAGTCCGTGT
TAAAAATGGGAATAAGACAGATGTTCAAGCCCTAGCTTCAGCAGTTTTTAGCTGAGATTTACTGGAAGAAAACATTT
TCTGAACTGTAAAACATGCAAAATGCCTACGTGACAGACTTCATTAACATTATTAAATGCTATGATATAGTAAAAGA
ATTTGTAAACTGTCAAGTGCTTTGTCAACATTAGGAATTTAGTTATTATAGGTATTTCCATATACATGTTGTATTTA
GAATTCCCTTTAATTTTATACTTAGGGTTGATTTGTATTTTAACTAAGTCACTTTATATATCTGGTCCCATTATACA
AGTATACTTTTCCTTAGGATAAGAAAGTGATCTTTATATATGTTTATCAACCCAAATGCCCATCAGTGATGGACTGG
ATAAAGAAAAGGTGGCACATACACACCATGGAATACTATGAATCCATAAAAAAGAACGAGTTCATGTCCTTTGAAGG
GACATGGATAAAGCTGGAAGCCATCATCCTCAGCAAACTAACACAGGAATGGAAAAACAGACACCGCATTTTCTCAC
TCATAATTGGGAGTTGAGCAATGAGAACACATGGACACCGGGAGGGGAACATCACACACCGAGGCCTGTCGCGAGGT
GGGGGGCAAGGGGAGGGAGAGCATTAGGACAAATACCTAATGCATGCGGGGCTTAAAACCTAAATGACGGGTTCATA
GGTGCAGCAAACCACTATGGCACATGTGTACCTATGTAACAAATCTGCACGTTCTGCACATGTTTCCCAGAACTTAA
AATTTAAAAAACTTTAAAAAAAGAACTGTAGATACTGATCCAAAAAAAATGTTCATTAATGGGGGTTAAATGATTAT
TTCTAAGTAGACTACTCTTGAACCCTTGAATCTTTAAGAATTTTCTTTGCTATTGAAGCCATTCAAACTCTATTTTA
TTAAAGCTGTCGTTATTCTAGTAGATTTTAAACAGTAATACCTGAATACATTAGAAATATGCAAATCTGCATTACAT
ATGGCATCTGCAGAGCAGAGGAGTTTGGTCATCTGGACTCATGCTAAAGTCTCCGAAAAATCCGCTTGTCTTAATGA
TGGTTGACTCGCTAATGCTATGCGTATATAGTCTTATTTTAAGTGATTGAATGATGTGGCTAATAACCCCTCTGTTA
GATGCACTCAGAACCTCACCTACCTGGGTCCTCAGCTCTCCAGTGAAATCTCTACTTTAAGTTTATTTTCTAACATG
GTAAGAGCCTTCAGTTTATGTTATGCTCAGGCCCGTCACTGTGAATAAAATATTAGAAATGGACTTTTTTTTTTTGT
ATTTTTTTAATGGATCCCTTGGAACTTTAAAAAAATTATTTATTTGAGCTTTCTACTGTTATCACAGTGTCTCCTAA
GCATGGCCTCCCGTTTTTTGTTGGTAATATAATTCTTACGTTATTCAAATTAGTAACCATTATTTTTCTCATGGCTA
GAATTCTGGAAACTATTAGGAAATCACTGAGCATAATTGAATGGCTGTTTATTTGAAGAGCTATGTCAAGGCAGCAT
AGAGTTGTATTTTCTTGCAGGGGCTCTGGAGTCAAAGAGCCTGGGTTCAAACCTTGGCTCCACCACTTTCTATCTGT
GGGGCATTGGGCGTGTTACATTTGTGAAACTTTTGTTTCTCCATTTGTAAAGTGAGGTTTGGGGGATGATTAAACCA
GATAACTCATGTGAAATATTTAATGGAAATGTATTTGGTAGGGGATTTATTATTTTTAAATTTGGATTGCACATGAC
ACATGTCAGGGATCATGCTATGCATTTTGGATAGAAAGATGGCTAAGATATCATGCCTGACTCTTAAAAACTTACCT
AATGGTAAATGACGAGTTAATGGGTGCAGCACACCAACATGGCACATGTATACGTGTGTAACTAACCTGCATGTTGT
GCACATGAACCCTAAAACTTAAAGTATAATAAAAAAAAAAACTTATAATCAACTGTAGTAGAAAGAGATCTGAATGG
CTTGCCATTTAGCTAGGCACATGGTATATGTGCTTAATTCATACTAGCAGCCACTACAGTTGTCATGATTAATAATG
AGCTTCCAACTGCACAGAATGCTTTTAATCCATAGAAAATCAAATCAGAAACAAGTTTTTGTAAAATTAATGTGAAA
GGAGCAACAATTAAAATGCAAGATTGACATTTATTTTCTAAATTGGTTCTATTTTCTTTCACATTTACAAAATTTAT
AAGAAAATTCTTTATTTCTATGTGATATAAAGAACTAGAATGTACTTTGATGTGAATTATTGTTGCCAGTGCTGTTC
AACTTTTATCCATAATTTACTAAGCACCTACATTTAGACAAAGGCATTATCCATCCCTTTGGGGAGGATTTCAGATG
ATTCATACACAGACCTGGTCTCGAGGAATTTAAGATTTTCTTTGGGGAGGGAAATAAGGACTTTAACCAACTCAAGA
GTACTTAGAGAATTTTCTGAAAATAATTTTATCAATGAAAACTTGTTATATTAAAAGAAACTGTCATTCTGACTTCC
ACAAATCTAGGCTTGAAACTATGGATAACGAGATATTTTCTATTACTCTCACTCACGTCATTTTCACAAAGTGAAAA
GGTACATTTTAACTAGTGAAAGAATAGAGGAAATGGAAGTAGCTCGAGGCAGTGGACGATGATTCAAAAAGACAGGG
CCCTATTATTTGATCAAGTTATGCAACGACTCTGGGCCTGTTTCTTCACCTCTGGAAGGAGGAATAATCTCCAAGCC
CTTTCAGACTCTTTTGGTAATTCACCTCCAGCACATCTTCTAAATGCCAGCATTAACTGTCCTCTGATTTGTCTCAT
GTTTTTCTAGCCCCATGCTCTCCTGTTCGCCATTTACCCTCATGCAAGGTACAAATTACACCCATCATCACAAGACA
CTTGCTCAAGTCCCATTGCCCCCTTGAAGACCTGCCACACCTACTCTCTCAAAAACCATCATTTCCTGAAAGTCCTA
TACAGCTCATTTGGTATTTACAGTGTACTGCCACAAGCCACTAAGCATCGTTTTGTGAATACATGACTTACAGACTT
AGCTTGAGTAAAGATACTTGAAAATGAACACCATTTCTTGGCTATCTTCCTATTTTGATGTACCCTTCAGGCCTATG
AATTTTAGTATAATAGATAACCAATAATTATTTCTTGGTTCTTTCCTGCACATCTGAATAACCCTATGCAAAGTGAT
AGAATGTTTTTCTATAAGGAGGTCCTACACTGGAGATTGTGTATTTCTTAATGCTGTTGAAGGAAGAGATGTGTATC
TAAAATAAATAGACTCTAACAAACATTAATTTATATTTCTATTATCTGTTTTGTGTATTGAGATATCTCACAAAAAT
AACTAAACATTTTGGCATTATTGATATTACATATTTGCCATGAATATTTGTAAATGAAGAAAAATATATATACATCA
GTAATTATCTTGGCAAACTCTTCAATTATGCAATATTGTTACATAGATTACATATCTAAGTGAACACTGGAGTTTTA
ACAATATTGTGTGTTCATAAATGTTTTATTTATTATTGCCACTAATTCTTATTGCCATTTCAAGAACTATGTATAAG
TTGTTCTAAAAACTATTAAAGTATAGGTGACCATGGTCACTACTGCCTACTTTGGTAAAGGCCAAATATGTGAAGAC
TTTTTAATGTGTTAACAAACGTTGAAGGTTTTTTAACCTGTTAACAATCAGTAGGACTCTTGAAATTATTTCCTAAG
AGAGTAAATTTTACAACTTGCAAAGCATGATTAACCTCTTGTAATTATAAACCATCTCTTGTAGTTATGTAGCATTT
TGTTAATGAGCAAAGAACCATTGTGGTTCCTTTTTACATTTCTTAAAATAATTCTCCGTAACCTCATTGATATCTCC
AGTAAATTTAGATAAGCTTTTTTTTTTAAAGGAGGGTTAAAATGACATTTTAAACTAATTTTTCTTGTTAGTTATAC
AGAGTTGAACTATCTGAGGGTTTTATTGACAGTCATAAAAAATTTGTTATTTTCTGTGAAATATAGAGAATTTAATT
CATTATCATATTATTAATTCTGTGGGCCATTGTCTTAATTCTAGAGGCACAAGCTGTTTTCATCCCACTGAAATAGA
GGAATCAAAGTATGTTCCTTGCTCAAAGCACAAAAGTGACATACTACATAGTATGCTTCTTGAGTAGTCGTAAATCT
CATGTGTTAAATTACATCCCAAAGATTTCAGTATGTTTTATGACTTTAATAATTTATGGTAATTTCTAATCTGGCCT
TTGTTGACCTGTCTTGCTTTTTAAATTTTTAGTTTTTCGACAAAATAATTAACATATTTTAATAATCTTCCAAAGGT
GTTTAAAATGGCATTGTATAGAGATAGCTGAAGGCTTTTGAGCTTCTGTGTTGTAAACACTTTCTTAATAAAACATG
AATTGCTACCAGATGATCCAGCAATCCCACTACTGGGCATTTATCCAAAGAAAAGGAAATCAGTATCTTTGAAGAGA
TAGCTTTGTTCCCATGTTTACTGCAGCACTTTTCATACTAGCCATGATATGGAATCAACCTAAACGTCCATCAGTGG
ATGAATTGAAAAGAAAATGTGGTATGAAACAGAAATTGCTGCTTTAATTTATATTAAACACACTCATATTCTTCTCA
GCTGTTAAGTATTGAGTTATAGATTTAAAGAATTCTATTGTGAAGACTAAAGTGACTATTAAAGTAAGAAATTATTT
TTTCCATTATATTTAACTTATTTCATACTTTAATGTTAGCGCCAATGAGCAAGACTATTGAATACAAAAACTAATTA
AGTAGTGGTGATAGTACAGTATATAAGGGAGAACATTCTTTTAGAAAGGAACAATAACAGGGAGCAATAGAAACAAT
GAATGAGTGTAAGGTCACTTAGTGTTAAAACAGCTAAAATATAGTACAAATAAGTTGCGTTTTAATAGTGATTTTAT
ATAATTACACCTTGATGTTTTATTTGTTACAAGAATTGTCCAGGAAGATTTCTCTAAAGACCAAAGGCACTCTTCCC
CTAAATAACTCCAAAGCCAGTCCTGTGTTTCTATAAAAAAAAAAAAAAAAAAAAAAAAAAAAAAAAAGTGAAAATAA
CGTGATGAACATTTTTGAGGAAGTATAAAACCAAAATACTCCACTGCATAGCTGTTTCTGCAGGTATTGTATTGATA
TATTACATTATTCAGCTTTGGAGTCTCCACATCCAATGTTACATCATCACTCTAAATTAAACATGTATAGATAAATG
AAATAAATGAGATAGCATATGAAAATCTCATAGCCCAGCCCCTGCACTATTTAAAATAGAAATACCAAAGAATTGTA
TTCCTCATCTGAAAGCTATTTAGTGGTGGTGTTTCAAATAAAAATTCCATCTACTGCTGTTGCTTCCATTGTATCTT
TTTCTCTGCGGTACTGAAAGAGAAAGAGACCCAGAAGGGGCCTTGTCTGAAGTGTCCCTCTTTTAAGCTGTTGCTGC
TTTAAGCACAGGGTGGACAAATGTAATAGGAGTTTCATAAAGGTGGAATAAACCAGCGGATTACGGTGTGGGTGAAT
ACTTTCAGATGTTAACCAGGAGCTCTGCTTGCATGCTGGGAGTTGCCCATGCCTCTTCTAGATTGAGGCACATTATC
ATGCACAACCTAACTCCAAGAAATCTTTTAAACCACTGGAAATTGAACCCAGAACATGTCTCTAAGCCAGCCTTTTC
ATCCTGACACCGAATCATAGCATGAGCCAGTCTGTCAGGGATGCTGCTGCTCTCTAGGCAAATTTTAAATGTTGAAA
TAATGAATCATGTTTTCTTGAAAACCATGTACACCAAAGAAAAGTTAGTCATTTTATAGATGATGAATATTAACATT
TTCTTAGACAATCTGATAAATTATCAGATCTCACTTTTGGCTCTTTTTAAGACAGTTATGCCTCAGAAATATTAATA
AACCCCCAAGCCCTTATACTGATCAGTATGTTCACTACTAGCTATGAGAAATTCTTGAAGTTCTTGTAATTATTGTA
TTATTTCCTTACTTTCATTTTATTAGTATGTGAATAATATTTTTAAAAATTCTAGTGTATGTCTTGTATATATTTTA
ACAACATGACTTTTAATTAATGTCTTGATAACATTTCTTCTAGTGTATGTTTTCAGTAACATGATTATTAACTGTAA
CTTTAAAAACCTGTGGATTAGATGGGACCATTTTAAAATGTTTTAAACCTGGAAAATCTGATGGCTTTAGGTTTAGT
TCAAGCTATAGATCACCTGTGGAGAATGGAACTGCCAAAAAAAAAAATAGCTGTAGCAGCCCTTTGAGTATTCTAAA
ATAGGGATGTTATCCAGAGCATTGGTTTCTAAAGCTTCCATTATTTATTGATGTTGAGCTTTCAGGATTTAGCTACA
ATATTTACTCAACATCTAAGCCATGCTTTTTTATCAGTCATGTTTTATATCTTTTATAATCAAACTGCTTATCACTG
AAAAAAATATATAAGTTTCTATGTATCTGGAAGAATTCTCTGGTGTTTCTTAGATATGGATTTTGATGTGTGGAATA
AGAATTCAATTCAAGGATAACAGAGATGTTGTCCTGAAAAAAATCGAAGAAAATCAGCTTTTCTTTAACATTCTGTC
AAAGCTCCTGACTATTAGTTTATCAGCACTGTTTTGCCAAAGGTGTCTTCTCTTCTCTTCTTTGAAAAAAATCATCT
GCTGCTGCTACGCCGCAAGTGTGTTCCCGCTGTGCCTGAGAAGATGTGTGGCATAAAAAAATGGGCATGGCCTGAGT
TAAAAGTGCTACATTTAAGCCAGAGCTGGCTTATTTATTAGTTGTCTAATCATAGGAAAATGACAGAGCATGCTTTT
CTCTTGCAATATCCGTTGCTGAAAATTAAACACATGAGCAGAGCTTTCAGAGAGGTTGACTGGCCTCTCAGACAGCA
CCTCATAGGATGGCCTGTGTTGAAGCATCTCCTTTAACCAGGGTCTGTCCCTCAGCATTGGGTTGGCTCACCTAGAT
TGGATTGTCCCAGCAGAAAAAAAAAACCCAAAATTCAGAATCATATCCAAACCGGAATACTCTTTCATTCACATTAC
TTGTACTACCTTTTCAGAAACTGGATACCTGAGTGTGTGAGGGTAACTTAGAAACTTATCTCATGGTTAGAAGTTTT
AGAATTAGAGAGCGATGATCATGAAACGGACTTCATGATCAGAAGCAATGGAGCAAGGAATGAGATGTCTTTGAGGA
GTATTTCCCTGAGGCTGTGGATAACGCTGACGAATAATCCCCACCTTAAAAGTGGGTTGACCACTCTAGTAGCTGTA
AGGTGGGAGGGTTCTTTCTTCAGAGATAAATCTGTGCTCTTCACTTGCCCATTTCCCAGGTTTTCATGTAGGTAGAA
GAAACACCTGTAATCTGAAGACACTCTTCCTTCAGCTTTGTTAGTGACAGGGATTTAAATATGTCTTTCACACATTT
TCCTTAGATAGTTAAATTTCACTTTTCCTGTTTGTTTTTCTCTGAAGGTATTCTAACTCCCCTCCTAATGGACTTCT
AGAGCTTTCTAATTCTATGCAATTTCTGTTGATTTGTTCTGGTAAACTTTGAAGGTAATCTCTGATTCAACTTCTTG
GAGATTCTATCATGTCATCTCTGTTTATTAACTTTATGTTACTCATGGTTTCTTGATGAGGACTCATTAAACATAAT
GTAAGTAGAAAATTATTAACTACATAATATTTACTACGGGTTGTTATTTCTGATAGTAGCTAGCTGTAAGATTCCAA
TTGTTCTTCAAATCTTTGTCTCAGTGATCTCTGTGTAGTTCTTGACTACTTCAAATAACTTCCTAGAAGGATAGGGA
TTTAATAATCTCTTAATAGGAACACTTAACACACTGCTGGTGGGAACGTAAATTAGTTCGGTCGTTGAAAGCAGTGT
GGTGATTTCTCAAATAACTTACAAAAGAATTACCATTTGACCCAGCAATCCCATTATTGGGCATATACCCAGAGGAA
TAGAAATCATTCTACCATAAAGACATATGCACGTTGTGTATGTTCATTGCAACACTACTCACAATAGCAAAGACATG
GATTCAACTTAAATGCCTATCAATGAACAGACTGAATAAAGAAAATGTGGTACATATACACCATGGAATACTATGTG
GCCATGAAAAAGAATGAGATCATGTCCTTTGCAGCGACATGGATGGAGCCAGTGGCCATTATCCTTAGCAAACTTAT
ATGGAAACAGAAAACCAAATACTGCGTGTTCTCACTTATAAATGGAAGCTAAATGATGAGAACATATGGACACAAAG
AGGGGAATAACACACACTGGGGCCTACTGGAGGGTGGAACACAAGTGGAGGGAGAAGATCAGGAAAAATAATTATTG
GGTACTATGTTTAGTACCTGCGTGAGAAAATAATCTTTACACCAAACCCCCGCAAAATGCAGTTCACCTGTATAGCA
AACCTGCACGTGTACCCCTGAACCTAATTTAAAAGTTATAAAATAAACGTATCTTATTTTCAGTACAATACACCACA
GAGTAGAAGGGTTAAAAGAGATTGCTTCTGAGGAGGTGAGATGGGGGTAAGGACAGCACAAGAGCATTTTGGGGGGT
GATGAAGCTGTTCTGTGTCTTGCCTGCGATGATGGCTACACGACTAAGCCCTTGTCAGAACTCACAGAACTTTACTT
CAAAAGGAGCGGATTTTACTACACATCAATTCCAATAACAAATACTTTGTCTTTAAGCAAAGGGATACCTAAATATA
GCGTATTGAATGGATCTCCAGAAAAACACATTTTTCAGTTCATGTTTCAGCCTAGGCCTCATCTCATCCAGGAAACC
TTGTCTTGCTTGCCTTTACATACATGTGGCAATCAGTAGTTTCTTTTAGGGCTCGGACTGAACACTCAATGAACTTC
AATCTTAGCGCTTGTCGTAGCAGATTGACATGGTTTATTTATATGTGTCATTCTCTGTAGTAAAAGGAAAGGATCAA
GGCCATTCACTTTTGTAGTGATTGTGCATGGCAGTATTTGGCACATAGTAGATTATTAATTATGGAACTTCTGTTTT
CACACACACACACACACACACACACACACACACTTCAGAGCTATTTTCATTTAAATATTTGCTTTAGTCTCCAAAGC
CCCTCTGCCTCAACACCAACCCTTCTATCTCATTATTCATCAGCTTTTCTCCTATTACGAAACTACTTAGGAAAGCC
CACTTATTTAGCTTATGATGGCAAAAATAAATATTTGTACTTTTTTTTTTTTTTTTAGTCATCGCTTCATAGAACAG
CCTCTGTCCTCTGCTTATGCCATGTCTGAATATATGCTGGAGGTAAAAAGAGTTCCTGGTTGAGAGCTTCAATTTGA
GAAACTATCTGAGATTACTTTCCAGGTTCCACCGTGGAACCTGTCTGACCTTGAACAAATGACCTCGAACAAGTGGC
TGAAATCTCTTCTATTTCGTCAACTGTAAAATGGGGGAAAACCATGTCTATCTCATGGGGTTCATGTGAAGGTTAAG
AAATTGCTTATTCAGTGTTTAGCACAGTGCCTGATATGCATAAAGCTCCTAGGAATATTAGCTGTTATTGTATTTCC
TTAAAGAAGCCCATAGCTCTATATGCCCTTTCATTATATGTTTTAGTAGCCCAATTTAACATATGGATAAAATATTT
TTAAGTTAAATGATTTGCTAATGGATTGTTGAACGAGTGGCAGACACCCATATTATAGACGAAGGTCAAGTCCATAA
CATACAGTACATTTCCCCACTTTCATTTCCCATTACCAAAATTCATTATTCTCCTGAGAAACTCATTATAGAATTCA
TGTCAGATTCATCTGTGTGTTCCCAGCAGTGCCTTATATCCAGAAATAACACTGAGTCATTGTCTAGATGTAGCAGA
GGTGGAATCCTCCAAAGAGAAGCCTCAGAGTGGCCAGGTTTGCCAAGTATAGGGATGCCTTGATTACTGGCCTTACT
CTTTATGCTCGTGAATTCCTAAGTTTTATTCCTCCTGTAGTCATAGATTGGCTTTTAAGCTACAAGCTGAAGAGAGA
GAAAACCTCTTCCACCTCGTTGGAATATGTCTCTTCAATCCATTTGAGCCAATTTAGGACATGAGACTGCTCTTAGT
CTAGAACCAGTCATCAGGAGAATTCCAGGTCTGATTGACTCGGACTAGCGGGTCAATATCAGGGCAAAAATTCCAAC
GCACAACACGATGTATCAGTAAGGAGAACCTCAAAATTATTTCTTAACGTCCAGATCATGTTCCTATTTTTATATAT
CTATTTTCTCACATAAGTCATTAAAATGATGTACCTGTGCGGGTCCTTTAATGATACTCAAAGATCTTGAATTATAG
GCTAATAACTAACTTAATAAGCTGCAGAAATTAACATTTCTGCTACGTTTATGTAGCATTTTCCCACATGTACTTCA
GAGGCTTGAGAAAAGACCCTGAAATAATGACTGAATAACAGCTTTACTCACTTAATTTCAAATTTGTTAATTCTTCT
GGGAAATACCGTCAACATCCATTTTATTATTTTTCTCAATTACATGTACGTTTCTACATCAGTGGATAAGTTAAGGA
GAAGAATTCCCTCATGATAATTTTTTCATGCTCGAAAATTTTGAATCAATTTTTTATTTTACATTATACTCTTTCCT
AGTCATTAGAAAGGGAGTGGTGGTTAAGATAGGCAAGAATGCTTTATAAGGATACTACTCTCGTTTCAATTCTTAAC
ATCAAAAACCTTAACAGTGTGTAGACTATAAAATAAAATATCTAGGGATCAGAGCATTGTGCTGAACTTTGCAGGTT
TTTTAGTCAATAATATATATGACGTGTTCACAGAATTCTTTGTCAACAAAGTACTTTTGGAGCTCCAGGCCATTTAA
GTTGGTTTTTGTACTTTTTCTTTTTCTTCGGAAGACTTTTTTTGTTCTATTTACCTGGAAGTGTTTCTTTTTTGGTA
CTGTGAATTAAAATGAGACCAATCTACTAGGCAGGAAAAAACCTTAATTAGATTGTTGACACAGACAAATAAGAATG
TCAATTAGCATCTACTGTCACATGCCTCTCCAGACTGCTTCTAGGATGAGTGGCCTCAAGCAGCTACATCATCTTTA
TACTCCTAAAGCATCAAGGAAACTTGGAGTGACAATTCATATCATGAACACATCCACAGTGATGATGATTGTGCTTC
TTCCCCCCCACCCAACAACAAAGGATGAATGCCAATTAATGTATTCAGTTTTTTGCGTCAAAGGCTGGATCACTTGT
GCAATGAGGGTAATCATCCTGACCAGACAGGCCATACAATCCATATTGTGTGAATTAAAGATAATATGCGTGAAACA
CCTTACTCTGGATGTGGTTCATAGCAGTAGCAAAAAGATGAAAACTATGGTATGCTAACATTTTAGAGATCTGTACT
CTATTTTAAATAATTTTATAAAAGTGCATATACAATAAAAAGTGCACGTATCACAAGTATATGCCTCAAAATCTAAA
GCCAGTCATGTAATCAGCATCCACTTCAAGAAAGAAAACAAAACAGTACCCCTGGTTCCTCTTTGCAATCATTAGTC
TCCCAAGAGTAATCACCGATCTGATCTGTGACAGCATAGATTGGTTTTGCCCTACTATATTTTTGCTGAATTATACA
ATATATGCTCTTTAATGTCTGGCTTCTTAGTGCATTGTATTTGTGTATCAGCTATTCTCTTGTGTGTAGTTATTAAA
CAATCATTTTATGGGCTGCATAATATTCCATAGGGTAAATATAACAGTTTTATTGATAACTTAGCTATTACAAATAG
TGCTGTTGCAGACATATATTCTATTACATGTCTTTTGGTATAAGAATTTACACATTTCACATGGGTGTATACCCAGA
ACTGAGATTGCTAAATATTGGGGCACATTGTATACATTTTGATTTAGTAGATAAGATATTGCCAGATATCGTAAATG
CACAGTTTGATAAATATAGAGATTTATACTTTTTCTAGAGAAAAGCCATCAATATCAGTGTATGTGTATATATATAC
GCGTGTGTATATATACGTATATATATACGCGTGTGTATATATACGTATATATACACACATATATATACGTATATATG
TGTATATATATACGTATATATATACACATATATACATATATGTGTGTGTGTATATATATATATGAAACAACTCAGAA
GCAGAAAGATACCCCATGTTCTCACTTATAAGTGAAAGACAAATAATGTATAAACATGTACACATGGACATAGAGTG
TGTAGTGATAAGCATTGGAGACTGAAGTGTGGGGGTGTGCAAGGGAATCAGTGATAAATTAATGGCTACAATGTACA
TAATTTGGGTGATGGATACACTAAAAATCCAAAGTTCACCACTATCCAACATACTCACATAATAAAATTGCACTTGT
ACCCCTTACATTCATACAAATAAAAAATTATTTAAATAAAAATAAATATGTGTATATGTATGCATACATACATATGC
ATATACATATGTGTTTGTGTGTGTGTATATAACTTACACTTAAAATAAGCATGGATGCTGCAATGAATGCTCAATTT
ACAAGGGTTGTCCATCCAAACTTGTGGCAAGTATCTCACCTCTCAAGTTGTTTTCTTTTTTCTTCATATATTTCTTG
CTTTTGTCTAGGAAGGAATAATTTGGCTTGCCTTTCAAGAGTGTACAGTCAGCATGATAACCCAAACACTTAAGACA
CGTGCTAACCCATGTGGATCCCTTGAGAGAAGGAAAACAGTGGTCCTTTTACTGGGCAGATAGAGCCCGGGGCCAGG
TTTCGTGGCTTGAAGATTTCAGCTTCTCTGCGCCTCTCAGCTCAGTGCCTCTGGAAGCAATTTACAACTTGTGAGGC
CATACTCAAAGGCCCTGTTATTAATTCCCCGCCTTCCGAGACCCCATTTCAGAGGATCTCAATTGCTCTCAGAGTGA
ATTTACTGTTTCCTGAATTCCGTAATCCCAATAGCAGGTCTGTTGTCCTCATTAGATAGCTTAAGTTAGAGTCGGCA
GTGTAATTGGCAACTGAGCTACTAAGTATCCAATGCTTATGTGGAAAATATGTTCCCTATTGCAAACAACTGATATT
CATATTCAATTTGGCACCATCATCTATCTATAAAGCAGATACTACTTGTGTTTATTAAGTTTTATCCCAAATAATTA
TTTTAGTAATAATGCTTGAAAATAGGCCTTGGTCATTTGCATGTCTGTATATGGCATATCCTGAGTCTTTGTATGTA
TTAGAAAGATCACTCGTTTTGACTTGATGGTTTAATAAAAGATGTCCCTCACTTTGGGCAGAGACATTTGAAAAAGG
CACTCCAACCAGGGACCTAAGAGGTGAATGAGATGCAGCTCTGAATCAGGTCACACGGCCTCAGGAAGGAAACATCT
TGGTTTTCACATCCCTCACTTCTCGATGTCATGTGCAATACACAAATGACCCCTCAACACACACACAGGCACATACA
CAAACACACACTCACTCACTCACTGTATTGTCTCTTTCCTTGACTAAGTCCTTCTTACTAACTCAAGCTCTAAAGCT
TTTTTACTTACCTAAGGTGAGTGTGTGAGGATTTGAGGTTTCAATATTAAAATTCAGAAACATTTAAAGTTCATTTT
AAATATTAGTAAAAAAAAATCTTGACAAAATACAATTATAGACAAAAAGAAAATTCAGAATATTTGGAATTTAAGGT
TGAGGTTACAGCCCTATTTATGAAATATTAGAAGAAAAATGCTGGAGAGAATAAAGCAGGTTTATGAGTCTGATAGA
AAGCATAACCAGATGATTATGCATATATTTGCATATGCAAAGCTTTCTAGGCAATCTGAACATTTAAACCTACAAAT
GTGGCTGCGATGAACAGCCACAGAAGAGCAGGCTAGAACAGAAGAGGAGGCTAGAACAGAAGAGCAGGCAGAAGTTG
TAAATGAAATGTTAATTTTCAATGGTTGATCTCCCAAGTACTGGAACAGATTTGTGCTGTTTTCAAGGTTTTGGTTC
AAAGAATCCAGTAGTGTATTGAATTGTTTTGTGGCACTTCCCTGTTATTTTGCTTTGTAAGCTACCTCAATCCATGA
AGTGGCTATGAGCCCCTTATACAACACTGTTGATTTTTTTTTCCTTATCTACGCAAAAGATTTTTGATTCAGGGCCA
GGCATGGTGGCTCACGCCTGTAATCCCAGCACTTTGGGAGGCCGAGGCAGGCGGATCATGAGGTCAGGAGATAGAGA
CCATCCTGGCTAACACGGTGAAAACCCACCTCTACTACAAATACAAAAAATCAGCCGGGCGTAGTGGCATGTGCCGG
TAGTCCCAGCTACTCGGGAGGCTGAGGCAGGAGAATCACTTGAACCCGGTAGCCGAGATCCTGCCACTCCACTCCAG
CCTGGGCGACAGAGCCAGACTCCATCTCAAAAAAAGAAAAAAAAAAAAGATTTTTTATTCAGGTGGCTATCAGACTC
ATTAAATAGAAGCCTTAGGTTAAGTTCACGGGTTGCTAGTTGGAAGCCTCCATGGACTATGTTCATAAAATAATAGA
AAGGAGTTATGCAGGACTTCTTGAAATGTTATTTAAAAAGTCAGAATAGGCTTTCTATTACTTGTCTGAGGTCAAAT
ACATGTAGTGCTTTCTGACCATTTCATCCAGGGTGTTAGCTAGGACAATAAGAGGTGCTTAAAAATTATTAGATTGA
GTAAATGAGAAAGCCCTTAGAAACATAGGAACAGAATGACCCTTGCTTTGGATCTAATATTGACTCCCACGCCTAAA
TCCCTTTGGAGAACTCCTTTATTTTCTCTTCCATCAAGAGCAGGTATAAATTAAAAACACCATTAAAGGGGCCATCT
AGCTCAGCTGAAGCTTTCATCACACATGTAGGGGAGGTATGGTTGGGAGGGATCTTTTTATCCTTTAGGTCTTCAAT
TTACATAGGACTTTTGAATAATCAAATAGCCCCAAAGAGCTGATCTTAGGACTAGTTGTAATTGAGACTATTTCTCC
ATGGGGTAGAAAAATCTAGTTGTAGGAAAACTGAGAAGTAGATGTATGTTAACCTCAAAGGCTGTTTTTTACAAAGG
ATGTTAAAGCATCATCTTTGCTCAGAAAGGGAGCAATAAAACAAATGAGTGGAAATAACAAAAGGAAATAATGGCCA
GGTGCAGTGCCTCACACTAGTAATCCCAACACTGGGGGGCTGTGGTGTAAGGATCGCTTGAGGCTAGCAGTTCAAGA
CCAGCCTGAGTAAAATAGGCCTCATCTCTACAAAATAGATAGATAGATAGATAGATAGATAGATAGATAGATAGATA
GATAGCCGGGCGAGGTAGTGTGCCCCTGTAGCCCCAGCTACTCAGGAGGCTGAGATGGGAGAATCGTTTGAGCCCAT
GAGGTCAAGTCTATGGTGAGCTGTGCTCCCTCCTGCCACTGCACTCCAGCCTGGGTGACAGAGTGAGATCCTGTCTC
GAAAACAAAAGGCATACTTTTTAGATGTAATGGAATAGAGTACTTCCAAACCTGGCTGCCTGCTGGAGTTGTATTGG
AAGAGGTTGCACGACTTCAGTGGAGATGGCCTAGATGCCTGCTCAGCAGTCATCTAGTTAAAGCAACTAAGAACATG
TAATATGAAACTGCAAAAAGAGATCGTGTACGTAAAATCACTCTGGGCTCCTCAGATAGAGTAATAAACACAACTCC
TGACAGCCAAATAAAAAGAGAAATAATACAGCCCTTGACTTCCTTGGTTGCTTTGACATACTAAGTAGGTGTTACAG
GTTGGGTTCTCTGGGAAACAGACTCTAAAACATTTTTATTTTTACTTTATTTGTTGTTATTATTATTATTATTATTA
TTTTAGACAGAATTTTGCTCTCGTTGTCCATGTTGGAGTGTAATGGCACAATCTCGTCTCACTGTAATTTCCGCCTT
ATGGGTTCAAGTGATTCTTCTGCCTCAAACTCCCAAGTATCTGGGATTACAGGCAAGTACTACCACGCCTGGCTAAT
TTTGTATTTTTAGTAGAGACGGGGTTTCATCATGTTGGTCAGGCTGGTCTCAAACACCCGACCTCAGGTGATCCACC
CACTTCTGCCTCCCAAAGTGCTGGGATTACAGGCGTGAGCCACTACGCCCGGCCAGACTCTAAAATAAAGTTTAATA
TGCAGAATACTTATCAGGGAATGCCCACTGGACCAATACATATTCAAGAGAGGGCTTAGAAGCAGGATTGGACAGAA
AGAGAAGTTGAGCTGTAATGCAGGCCCAATAACAGCCTTAGTGTTAAGCAGGCTGAGAGATTCAGCAGTTAATGAGA
CAGTCAACCCAAACAGTTTTATAGGCATCAAAAGTATGATCAGCATGGTGTCAGTTTCCTGTGTCACTTGTCCCACA
GTATGATACCAAAATTAAAGAGACCAGATGACATGCAACACAAGCAGTGTGCACTCTGTTGTTGAGAAGCCAATTTC
GTCATGCAATTAAGCAGTTTTATACTCTGCAGCTGTACTTTAAGGGGAGCTGAGATGGAACATCATATGTCTCACCA
TAACCAGAAAGGCAGATGAGAAATGTTCTATCGCCACCTCCCACAAGGTAAGGGACTTCCCTAAAGATACAGAGGTG
GGTGGAATATTGCCTTGGTAGACTTCCTCTCAAGACTGCCTATCTTCCCATGTTGGAAGGATCACAGAGCATTTGTC
AAGACGTGGGTCAATCTGCAGTTGAACTTTGTGTATGTGGCCTATGTGGATACTTATAATATCATTGGGCACCTCCA
TAGAGCTGTTTCCCAATTGACCAAACATATGGGAAGCTTCAGAGCTTCGAATGACCCTTCAGAGTAGTCCTGAGAAC
AGTGAGCCTTACTACTCCTGCATTAATCAGTCATTGGATGATAGCCTTCTCAGAAATAAGTCATGACCTTGTGCAAG
GGGGCTCTTCATGGCTGGGACCACCCCTAAAACTGAGAGCTGAAGGCTGTCTGCCACCAGCCCTTCCACCTGCTGGG
ACAAGTTCTTTATTGAAGGGAAATCTGAGTAGTTCATCAGCGTCCATCACAGTAGTCAAGCCGTTCATTCTTCCTTC
TTATGACAACATTGTGCTTATTGTTATGTAATCCCTTTCCAGAACATTTTAGGTTAAGTTTTAAAAATAATGCATAT
AAATAGACAATTCAAATACTGGGGAAAAAAAGCTTGCACTTATATTGTTATAGAAATGTGCACACTTAAAGAGCTGA
TTTCTTCTGGGTATTTACATAACTTTATTTAAAAATCCATCCATTTTTAATTAGCTGTTTTTAATATGCAGTTAGCT
AAGATATTATAAGCCATATATTAGGCTAATGGACATTTAACAGCTTAGTTAAGTTCTTTTAATGGAAATGCTGACAA
ACCTTTGTCTGTAATTATAGCAACACTGTGATTACAGAAGGAGGTGCCTCTCCTTGTTGTTTGCAGCCCTAAAATTC
CATGTGGCTATAAGTAACAAAGTCCATTATTAGATAAACACAAGTCATACTTGGCATTACTTGCATTACTCGTCTCC
TTGCTTTATTTGAATCATTTTTTAAAGTTGTAAAATGTTTTTCAAAACTCAGAATAGTGGCCAGTTAATAATATGAT
TCCTCTTATATTATGAGATTTTAAAAAATAGTTCACCAGTTTCTGGTGGCCTCTATACCCATTGGCAAGTCCTAGCC
ATTGTGAATTAAGTAAACAATTCTTTATGGAAATTTTTTAATCCTTAAACCCTATAAGTTTTTATTCATCATGTCAG
GTCACTTGTCAAAGGGTTTAACATTCAGAATTCAACAAAAGTTTATCAAACACCTATTACAGGACGTGCAATTTTGG
GCGCACTGGGATTTCAGCAATTAACAATCAAGATATGATTTGTATCGACATGGATATTACATTCTCTCACAGGAGAC
AGAAAACAAAATAACTAGAAAATATACATAAAGAGACTTTAAAATGGGGTAAAATTACAGATTGTGACAGGATGACC
ACTTTGGTTCAGAATATCTAGGACATTTTTTTCTTTTTTTTTCCCCTCCCTCCCTCTTTCTTTTTTTTCTTTTTCTT
TTTCTTTCTTTTCTTTCTTTTTCTTTCTGCCTTTCGGAGTCTTGCTCTGTTGCCCAGGCTGGAGCGCAGTGGTGCAA
TCTCAGCTCACTGCAACCTCTGCCTCCCATGTTCAAGCTTTTCGTGTGCCTCCGCCTCCCAAATAACTGGGACTAGA
GGCATGCACCACCAGGCCCAGCTGATTTTTGTATTTTTAGTAGAGATGGGGTTTGACCATGTTGCCCAGGCTGGTCT
CAAACTTCTGACCTCAAGCGATCCACCCGCCTCAGCCTCCCAAAGTGCTGGGATTTACAGGCGTGACCCACCAGGCC
CAAGCAAGGACATTTTTTTCTGAGCCATGTTATTTAAACAGAGATCTGAATGACAAGAAGGGGCCAGCTCTGTGATG
TAGGGGAAGAAAAATATGTTCCTTCTACCCTTCTAGGCTGCCCAGCTGGAGTCCTACAAAGTTAGAGTGACAAAAGA
CAGATTAACAAGAGGAAAAGCCTAGAAGTTTATTAAAATATTCAGTGCACATACACCTGGTAGAAACTCAGTGATGA
GTAACTCAAAGGGGTGGTTAGAATGTTGGGTTTATATAGCATCTGAACAAAGAACAGTAAACTTGTAGAGAAATGAC
AAAACAAAGAAAAAAGGGGTTTAGGTATTTAGGGTTGCCAAACTGTAGGAAGGTAAATATATGGGAGAAACATGGAG
TATAGTTTGTTTATGCCAAGTCTATCTTGAGATCAACTTTTCGTATTCTTCATGGCCATAACAATTTCCCAGGAGAG
AGGGCTTATAGCAGTTATCATTTCTCAGAAGTTTCTGCTTTTATTTAGACAAGGGAAGCACTGGGAAGGCTTCTTTT
TGCTTATATTGATTCTTACTTGCCTCTAACTAAAAGTAATCTTTATGTCAAAGTGCCATATTTTGGAGTGGTATATA
TTGATCTCCTATAATAACAATCAAAAGGAACAGTATTCTAGGCAGGAGTACCACTAATGCATAGTGTTTGGTGTAAA
GACAAGTTAACATATTCATGGGGCAACAACAACAATAAGCCAATATGGCTAAGACATTGAGGATGAGTGAGTTGGAG
AAGTAGGCAATGGCCAGCTCATATAAAGACTTGTTCGTTTTTATAAATTGTTTAGATTTTATTGTAATTATGGTGGC
AAGTGATTGGAGAGTATTAGCTTCACTTTGACTGGCTTATCGAAAACGGAATGTAGGGGGTGAAAGTGGAATAAAAA
GACCAGTCATTAATTGAGTAGTCCGTGTGAGAGATGATAGTGGCTTGGACAAGGACGATTGTACTGGAGAGATTGAA
GCGACTGATTTCAGATTTGTAGTCAACAAGGCTTAATTGGTAGGAGAAAAAAATAAATCAGTGTTAACTCTTTAATG
TTTAACTTGAATAATTATGATGAGGGTATTACCATTTATTGAGATGTAGAATATTATAAAGTAAGAGCAGATTTGTT
CAAAAAGTATCAAGAATCTTTATTTGGACATGCTAGTTTGGGGATGCTTATTAGAGACCCTAGGAAACTGAATATAA
ATGTGGATTTTAGAGAAGAGCTTAGGGCTGGCAGATGCACATTAAGGATCTGTCTAGAGCCATGGCGCTAGAGACCT
CCAGGAGAACATAAATAGTCTCAAGATCAAGCCCTGAGACACTCAGATGTTTAGAAGTGGAACAGAAGAGGGACATC
CAATATAGAATACCAAGAATTAGGAGGGGAATCAAGAGAGTGTGGCAATATGAAAGATACAAAAAGAGTGTTGAAGG
GAGGGAGTAATTAATAACCAGCATGTTATGAGGGGCTCAGTATAATGAAAAGATAAGTGACTATTGGATTTGGCAAC
ATATAATTTTTTGGTGATCTGGACAAGAGCAATTTGAACAGAATGATGGATATGGAAGGTCCAGAGGAGTAGGCTGA
GTAAATAATATAAGGTGGGAAAATAGATACAAAGATTATAGACAACTTTTTCAAGAAGTTTTACTGTGAAGGGGCAC
AGCAAGCTGAGACAGTGAGGATAAATAATAGACTCAAGGATGGTAACTTTAGAATAAGAAATTTCAATCTGATGGGA
TTTAAGTGTTAGCAAGGAAGCTTTAAGAAGTTATTTTCCCCATTAGAATGATCTGAAAAATGTTTTAGAACATTCCT
CTTATATTCTATTTTATCACATTTATATAACTTTCAGAGAATTGAAAGAGGTATTAAGTTATTATGAAATTTTCTGA
GATTAATAAGATAACAATTATAGGATGTTTTCTTTTAGTTGAAATACACCTACTCAGCCTAATTTTTATAACTTCTT
ACTGAAGTATAATATACTTCAGTAGAAAAGCATGCCTAATATAAAGGTGCAGCTAGATGAATTTGCACAAACTGAAC
ACATCCCTTTAACCAGCACTTAGATTAAAAACAGAACCTTGATGATACCTCAGAGGCCCCCTTCTGCCCCTTTTCAG
TCTCTCCGTGCTACCCCCATGGATAAGCATTATCGTGATTTCTAATACCATAGATTAATTTTGCCAGTTTTTGAATT
TTATGCAAATGGATCTATTTCACCTAATTGTAAATATATAACATTGTCATAGCAAGGCACTCATTGCCTTACACTGA
AAATTACATTGACTCTTTGCCACAAGCTTAGACTTGCTTTCTCATTTTATTATCATCAAGCCTATAGCTTTCACACT
ATACCTTGTTCCTGCTCTTCCCTACTCTATTTCTTGGTAGATATTCTATATCAGTCTTAGAGTGCAGTTTGCAGAAC
CCCTCCATCAGAATCTCCTAGGGAGCTTGTTAATAATGCAGATTCCTAGGCCCCTCCCATGGTTTATGAATCTGAGA
GTGAGGCAGACAAGACTATACCCTCTCATGCCTCTATAATGTAATAATGTCTTCCTAGAATGTTCTTTGCTGCATCT
CTTATTAAAGAAATCTTATGGGCCGGGCAGGGTGGCTCACGCCTGTAATCCCAGCACTTTGGGAGCCTGAGGCGGGC
GGATCACATGGTCAAGAGATCGAGACCATCCTGGCTAACACGGTGAAACCCCATCTCTACTAAAAATATAAAAAATT
AGCCGGGCGTGCTGGCAGGCGCCTGTAGTCCCAGCTACTCGGGAGGCTGAGGCAGGAAAATGGTGTGAACCCGGGAG
GTGGAGCTTGCAGTGAGCTGAGATCACGACACTCCACTCCAGCCTGGGTGACAGAGCGAGACTCTGTCTCAAAAAAA
AAAAAAAGAAAGAAAGAAAAAAAGAAGTCTTATGTTTCCTTTATGGCCAGAGCACAACATTGTCATGAAGTCATCTA
AAATTTCCCACTAGAGGTAACATCTCCTTCCCCTGTCTAGCTCTTTTAAAGCATTACCTCCATTTGCCTTGTATCAT
AGCTGCTTGTACACCTGTCTGTCTTTCCGCTGAGGTTATAATCCTCTGGAGGGTCATGACTTTGCATTCCTTTGTGT
CTCCCATTAGCAGCCAGCACAGTGCCTTGCATACTGTTAGTTCTAAATAACTTCTCTCTCTCTCTCTCTCTCTTTTT
TTTTTTTTTTTTTTTTTTTTTTTTTTTTTTGAGACAGAGTCTCGTTCTGTCACCCAGGCTGGAGTGCAGTGCAATGG
CATGGTCACAGCTCACTGCAACCTCCCCATCGTGGGCTCAAATGATTCTCCTGCCTCTGTCTTCCAGTAGCTGGGAT
TATAAGTGTCTGCCACCACGCCTGGCTAATTTTTGTATCTTTAGTGGAGACGGGGTTTCACCATGTTGCCCAGGCTG
GTCTCGAACTCCTGGTCTCAAGCAGTCTGCCCTACTCGGCCTCCCAAAGTGCTGAGATTACAGGCGTCAGCTGCTGC
GCGCATCCCTAAATAAACTTTTTTTTTTTTGGCATGAAATCTGTAACACTGGAAAGATGTTATTGCCTTAGAATAAT
TAAGAGATTAAATGTAGAATCTCAAAAACATTCATTTTTTTCCATGAAAACTTTACCAGGCCTCAAGGGATAGGAAA
ATTATGGGTACAGAATTGAGAATCTGTAGGAACTTGCAAGATAAACAACGGTTTCACAAGAAAGACCTTGTTGGAGA
GTTAAATTTTCAGACAGTTGTAATAACTTCACATTAAAGTTTTGTCAAAAAATAAGTATCTGCATGTTTTGTTTGCC
TTCCAATGCCCTCATTTTATTTGATTTTTTCCCATAAGTAACTATAGTGAAAGCACGAAAATGTGTTTCTGTGTTTG
TGTGCCTGTATGTTAATTGTGACTGTTTCTATTGCATTGTTATTGCAGAACCTAGGCACGCACTCTGTAGGCTTGGG
TGCTTTCTCCAACTGAAAAAAATCCTACATATGGATAAATTATTTTTACAGCCAGTGTTTAATTTTACAAGTGGTCC
CCCTCCTTCTGTTTTTAGGATGGCAGAGAGAATACATATTTACTTACCATTATCACTTACTCATGCTTTGAGCTTGA
AGGAAATGAGACAGAAAAATGAAGTAACATTAACTTCTCTCTGGAACTATGTTTCTCATATTAGAGCTTTATCTGAG
GAGTTCACTTCCTCTCTCTTCAATGCTTTGTTCCTCTCCAGTCGATTCAAATGTCCTCTTAAAGCAGAAGTTCCGAA
CCTCTTTCTGTGACTTCAGGAGAGCATGAGAATGTAAATATAAGTTTTAGGACTAAATTTTCAAAGACTTTTTCCAC
TCAGCTCTCTTTTCCTCTTCGGTTTGTTGTTGTCGTTGTTGTTGTTGTCGTTGTTGTTGTTGCTGCTGCTGCTGCTG
TTTTTCCCCTTCCACTTCCGTAACTGAGCTCTTAGGGTCCATCTGGAATCTGATTGCAATTAAAAAAAAAAAAGTTT
ATTTTTACCTCCTTGTACGTGCTTTCTCCTAAAGCAGGAGTCAGAAGCCTTTTTTCTTTGAAGGGCTAGTTAGTAAA
TATTTTAGGCTTGTCGTCTTTGTCGCAATTACTCAACTACGCTGTTGTAGTATGAAAGCAGACAATACATACCTGAA
TGAGCATGGTTTTGTTCCTAGCAAACTTTACGCACAGAGAAATTTGGATATCGTATAATTTTTATGTGTTGCAAAGT
TGTATTATTCTTTTGATTTCTCCCCAACCATTTAATATGTAAATCCCATTCTTAGCTTGTGTGCCATACGCACACAG
GCAGCAAATGCGAGTTGTCACACAGGCTATAGTTTCTGACTTTATGTCTTAAAGTAAACAGTAATAATCATTCTCTT
TTTCCAAACAGTCCACTAATCTCCCTTTGTATTCAGCCCTTGCATAGTAAACGCCGTTTCTTCATCATCCTGATTTT
TATTCTGAGAAAATACTGTATATTGTTCCCATGCACTAGGGTTCGGGGAAATTTAAAAGGATGTAGGATCTCCTTTT
CATTGGTCCTAAAATTGCACTGGGGAGGCAGGTCATGTTTATGAACAGATAAATAGTATCATAATATAATCATGCAT
TTCTATGGCTAGCATTTAGAACTATAGCTTTTGATGTCATGTGGTTTTTATATGGTTGATTATTTTTTTCTTATTTA
TAAAATGAAAAAGTTTGAGAATTTTTCATCTCCTTAATGTATTCCCTTATTTGAGGGAAAAGTATTTACCTACTACA
TAGGAATTTATCTTAAAATTTTCTTTGTCTATCTATTTTTATGGAATATAATCGAGCAACTATTTTACTAATTAATA
CTTTAATATCATTATGAAAATGTTCTCATATTTTTAACCTTATAAGATCAGATAATTGCTATGCCAATCTATGGTTG
AAATGGGTTCTTATACTTAACGCTATGCTCTTTCTTCTGAGATGTAAAAATATGTTTAAATCAGAATTTATATAGGT
GTCAATTCAAAATGACAGTAGTTCATTATTTTGATTAGTATAAATGTTCACAACTAATTCTATTCTCTTATCTATTA
AGTCACCAAATAAAGTATATTTGTTTTAAATATTTAACAGTTTAAATTATTCTTTGAAAACTTATGAGTCTAAAGTA
AGAACAATTAACCCATTCATTTTGCAAGTGGGATAGTTGAATTTTACTTGCAATCCAGGGATTTTTGACAGTTTGAA
ATATACATACATACCATGTATGTTTAGGAAAACATTTAAAAAGAGGGGGTTGTAAAATAATAATAGTTCTTCCATGA
TTTTTTAGCCATAATGTTTATAATATAAAATATGTATACTCTTGTTATTGAATGTAGTATGTTTCTAATTTACCAGA
AGGCAAGAGAATAATCCTGGAGAATTTCTCAAGGCATCTTCGAACTCTTTGATTTATTGCTCACATATAGTAATTTG
CCAAATGACGCCCTAGTGAACTGAAAGAATTAATGCCCCGTCCTAAGTCACTTTCACCGAGGGACTGAAAACCTGCA
GCATTTTGCCAATTAGAGGAGGAAACAATCTACCTTGCAGAGTCAGGAGTACTGGATAAAGGAGCTAAGAGTGTTGC
TTTTTTTCCCCTTCTTACTTTAAAAATCCCAATTCATCCCATGTCTTTCTTAAAGGCTAAGTGAAGTAGTAAGTACG
TTTTTGCAACATACGAATTTAGCAGACTGGCCTTGTGTTTATTTTTGGCCGGAACCATTACACTTATTTCCAACCCT
CTCCTTTATTTGTTGGTTGATAATGGGCTAATTTTGAATCTTTACTGTCAAAAGAACATTAAGAGAAGCAGCCCTGC
CTGCATCGCAGGCTATGTCTGTCCTTTGCCGAGTATTAAACACTAAAAAAAAATTAAGAAAATACTAACAAAATGAC
AAAGCATTAAGAAAATAAAACTAGATGTTAAAGGAAATGAGAAAATAGGAAAGGATGCTGTACCTGGAGTGATTTTT
TTTCCCCAGGCTACCTAAGATGATCAAAAAAGAGCTAATTTCTCTTAGGTTTCTATTAAGGAATTACTAGAATATCG
GGCACACCAGGAAACTTTATCAGTGGACCTGTCCTGAACCAAATTTTCTTAATGTATATATGATAATTTGTTACCAC
ATCCCAGATTATTTTACAGGAATTAAAATATATTTGAAACACTGACAGGGAAAATTGGGTAAGACATTGATAGATAC
TACAATCTGTACTTGAAACTGCACTCAAGGAATTCGTTAGTCAAGAAAGAACACAATGACTGTGGGCCCCTCTGGGT
TTTGGAACCTCTTTTGTAAAGCATTTTTTTTTTTCCCAAATAGAAGATATTATTTTTGAAAAGGTTAAATAAAAAAT
CTTTGTTCACTATATAGTTTCCTCCTAAGGAGTAAATTAATTTATATAAAATATTGCAATATAAATAACAATTTTAA
AATCTCAAAAGAGCAGTGTTTTAAAAATAATGTAGAAACATTAAGAAATGACTTCAAATGATAAGAATGTCATTGGA
GAGCAAAGGGTTTTTAATATTACATATCGTGGCACGTATATCAGCACCCAACCGCTCAAGATACAGAGTTCTTTACA
AAAATCAAACAGAAGGAAATGTGCCACCTTGTTCATAAACTATATTTAATAATAAGCCAGGCAGATAAAGTCACTTT
CACAAATAATGAGCAAGCCCATGGTAATATAATTCATTTACAATAAGATTTATCTCATGGAATTCTTAGACTGTGCT
TTGAAATTTAAATAATTCTGATAAATGCCAACAGAATAGAGAAATCAATTCCAGAGCAATTACTAACACGTTGCATT
ACCTTTCTAACATTAATATTTCTCTTCATACATATCATTGAAGAGAAAATGAGGATGGAAAATAAAAAGATCAGGTA
ATATATTTGCTTTCTCATCTAGGGTTGTTATGATCTTCAAGATGAAGTTTTATTTTTTACTCCTAGCAAATGATATT
CTTTTTTATTTTAGTTTTTATTATTTTATTTTTCTGTAAATTATTGGGGTACAGGTGGTATTTGGTTACATGAGTAA
GTTCTTTTTTTTGATATTTCTGAGATTTTTTTTTTATTCTACTTTAAGTTTTAGGGTACATGTGCACAACGTGCAGG
TTTGTTACGTATGTATACATGTGCCATGTTGGTGTGCTGCACCCATTAACTCGTCATTTAGCATTAGGTATATCTCC
TAATGCTATCCCTCCCCCCTCCCCCCACCCCACAACAGGCCCCGGTGTGTGATGTTCCCCTTCCTGTGTCCATGTGT
TCTCATTGTTCAATTCCCACCTATGAGCGAGAACATGCGGTGTTTGGTTTTTTGTCCTTGCGATAGTTTGCTGAGAA
AACCACGAGGTACCATCTCACGCCAGTTAGAATGGCGATCATTAAAAATCAGGAAACAACAGGTGCTGGTGAGGATG
TGGAGAAACAGGAACACTTTTACACTGTTGGTGGGACTGTAAACTAGTTCAACCATTGTGGAAGTCAGTGTGGCGAT
TCCTCAGGCATCTAGAACTAGAATTACCATTTGACCCAGCCATCCCATTACTGGGTATATACCCAAAGGATTATAAA
TCATGCTGCTGTAAAGACACATGCACATGTATGTTTATTGCGGCACTATTCACAATAGCAAAGACTTGGAACCAACC
CAAATGTCCGACAATGATAGACTGGATTAAGAAAATGTGGCACATATACACCATGGAATACTGTGCAGCCATAAAAA
AGGATGAGTTCACGTCCTTTGTAGGGACATGGATGAAGCTGGAAACCATCATTCTCAGCAAACTATTGCAATGAGTA
AGTTCTTTAGTGGTAATTTGTGAGATCCTGGTGCACCCATCACACGAGTAGTATACACTGCACCATATATGTTATCT
TTTGTCCCTCGGCACCCCTTTTCTACCCCCCAAGTCTCCAAAGCCCATTGTATCATTCTTATGCCTTTGCATCCTCA
TAGCTTAGCTCCCACGTATCAGTGAGAACATATGCTGTTTGGTTTTCCATTCCTGAGTTACTTCACTTACAATGATA
GTCTCCAATCGCATCCAGGTCATTGCAAATGCTGTTAATTCATTCCTTTTTATGGCTGAGTAGTATTCATATATATA
TATATAGACACACGTACATACATATGTATATATACCGCAGTTTCTTTATCTACTTGTCGATTGATGGGCATTTGGGT
TGATACTTGCACACACATGTTTATAGCAGCATAATTCACAATTGCAAGTGATATTCTCAGGAAGCATGATGTAAGTG
ACAGAGACTTACTTTGTAGACTGCACTCATTCACTTGTTCTCTGAATGTGCTCTAGGCAGCCTGAGTTTCTACTATG
TCAGTGTTACATAGATGAGAAACCCCATGGGTGGTTTCCACAGAGGCTGCAATACTATTTTTGATACCAAAAATCTG
TTTGGTTTTGTGAGCCCCAGATGCCCATATGGAAAACTGAAGTGTTGATACCTCTTTGTAGCCCTCTGATGAACTGC
ATGGTTCACCTTCCTCAGCAGTTTGAGCGGGGTGGGGAGAGCGCCTGCTTCCTAGCCATCCGATTGGCCTGAATCAT
CAAAAATGCTATCATGAAACAGGTTCTGTTTATCTGCTCCAGATTACACCCATCATGTTCTAGAGTGCTGGTTTCAT
GCTTGAATCTAGATCAAGCCTGCTTTCCTCCCCTGCCTGTACTCCCTGTGGCTACCTACAGTCCTGCTGCTGACAGA
TAATCTAAACCAATAGCACCTAATTAGCCTATTTGCTCATGTGTTTTTTCCATCGTGGTATAATGTCCTCCTTGTCA
ATTTAGGGTGAAAATGTAGCAACACGTTGCTGATGGTTTAATTTCTGGAATGCAGGTAATGAATGTGTTTTTGCTTA
TCCAAGTCTTCCCATCAGATGTCAAATATAGAAGAACAGTGTTCAGAGGTCCTAAATTTAAATTGGAGTGAGAAATT
CACAGCGCCCCTGAACTCAGGCAAAATGCACTCTGACAAGTCAACCAGATATTCACAGATGGTCTGGAGGATTTGAA
GCCTAATTTGGTGAAATAAAATTAAATGAGTGAAATTGTATGCAGTCATTAATCTATCACCATACTTAAAATGCTTC
ATTGAAATTTCTTTTACTGCTTCAAATGAAAAAAGATCAAACTATGTTATAGAAAAGCATTCAAAACCCTTACATAA
CATAGATAAAACTTGGTTGGAGACTTACAGAACTTTCTCTGCTGCTTCGAGAAAGTTACAGTGCCCACAAATCTATT
GCTATTAGAATATTTTATTGTATTCAACACTCAATTCTACCATAATTATGTATATGAGAAAAATATTTTTACCTATA
AAATAATTATTATTACCTTTTAAAAATCTGACATTCTTCCTTTTTTCTAAAGAAACATATTTAGATTTAGCTTTTAT
TTTATTTTTGTGTTGATACATAGAGATTGTACATATTTCTAAGATTCTAGTGATATTTTGATACAAGCGTATAATGT
GTAATGATCAAATCAGGGTAATTGGGATATCCACCATCTGAAACACTTATCATTTCTTCTTTTCAATGCCATCATAC
CAAAAGGAAGTAAATAGAATTTCAAATATAAGGACAGCCATGATTTTACATACATGCCTACGATTCCACCACAAACC
ATAATTACGTCCCCCAAACTTTTAACATTTCAGATACTTTGTCCCAGGTATTTCATGATAAGGATTGGGCTATGACT
CTGTTACAGAAGGGCCAAATGACTAAAATGTCTCTGAACAATATTGATTGCAAATATTCTACCCAGTTGTCAGGTCA
ATATGTTCCAATTCGGAATTTATAACATTGTATCTCTACTCCCAAACCATCCAATCTCACCTACCTCACTTCCATAT
TATGGTGGGTGATCTCAGATTATATTTAAGCTCATGGTTACTTGTCAAGTAGATATGGAGTTTAGCCTAACTTTTGA
AATTTATGCTGAGATTACCCTTCTCATTATAGAATTAAGTAGGCAGTTTCCAAGTTTAGATTTAGCAGGCAGTTTTT
TTCAAATCACTTAAAAGTTATATTTTTTTAGGGCATTGAACAGGTTTGAAATCCTACCAAGATGTCATGTACACATA
GACCAATAGAACAGAATAGAGAACACATAAATAAAACTGCACAGCTACAGCCAACTGTTCGTCGACAAAGTCAACAA
AAAAATAAGCATTGGGAAATGGATTAAAGATTTAAATGTAAGACTTCAAGCTATAAGAATCCTAGAATAAAATCTGG
GAAATACCATTCTGGACATTGGCTTGGGAAAGAATTTTTGACTAAGTCCTTAAAAGCAATTGCAAAAAAAAAAAAAA
AAAAAAAATGACAAGCAAGGACTTACTAAAATAAAGAGCTTCTGCATGGCAAAATAAATGATCAACAGAGTAAACAG
ACAAACACCAAATGGGAGAAAACTTTTGCAAGTTATGCATCTGACGGTGGTGTAATATCCAGAATCTATGAGGAACC
TAAACAATTGAACAAACAAAAATCATAAAACATCATTTAAAAAATGGGCAAAAGACATGAACAGACATTTCTCAAAA
GAAGATATACACGCAGCCAATAAACATGAAAAATGCGTCACATCACTCATCATCAGAGAAATGCAAATCAAAACCGC
AAGGAGATACCATCTCACACCCGTCAGACTGGCTTTGTTAAAAAGTCAAAAGACACCCAATGCTGGCAAGGCCGCAG
AGACAAGGGGATGCTTATACACTGTTGTTGGGAATGTTAATTAGTTCAGCCACTGTAGAAAGCAGTTTGGACATTTC
TCAAAGAACTTAAAATAGAACTATCATTTGACCCATCAATCCCATTACTGAGTAGATATCCAAAAGAAAACAAATGG
TTCTACCAAAAAGACACATGCACTCACATGTTTGTCACAGCACTATGCACAATAGCAAAGTAATGGGATCAACATAG
GTGTCCGTCAACGTTGGATTGGATAAAGTAAATGTTGTACACATACACCATAAAATACTATACAGCCACGAAAAGAA
GAAAATCATATCCTTTGCAGCAACATAGATGCAGCTAGAGGCCATTATCCTAAGCAAATTAACATAAGAACAGAAAA
CCAAATACTATATGTACTCAGTTATGAGTTGGAGCTAAATGTTAGGTACTTATAGAATTGAAGATGGCAACAGTAGA
AACTAGGGACTAATAGAAGGGGAAAGGAAAGGGGGAGACAAGGGTTGAAAAGCTGCCTATTGTGTACTATGCTTACT
ACCTGGTTAATGGGATCATTTGTATCCCAAACCTCAGCATCACGCCATATATCCAGGTAACAAACCTGAACATGTAC
CCTCTGGATCTTAAAAGTTGAAAAAAAAAGATGTCATATAAATATTCGTGGTCACTAAAAGTATCTAATGTATTATA
CATAAAAATAAAAATTGGGTGAATTGGAAGTGTATTCTTTGTATCAAGTCATGTCGGAGATCCTATTCTGCTTTGAT
CACAGTGTGAATTCTTTTGCATTTTTGTTACCAGTCACTTCTTTATTTATTGAACTAATAATTACATATTCTGATAA
TCTGTCAGAAAGATAAAAACATTCTTTGTCCATGTGTCTGAAAATTTTTAACCTATTTTTCTAATGTTTTAAGTGAG
AAGAGCATGTTAATACTGAAATTGTAAGCAGTAGACTGAAAAATCATCCCAATCCATGGGTTATATATTGAATTGCT
TTTAACTGTATTACTAAATATTAAGCTTAATTTATTTTATTTCTACATATCCCCATTTCCACTATAGGTGATTTGTA
TGAATTTAGGAACTTCCTTCTCTCATCCATTTTTATATTAAAACTCAGACTTTCTAAAACAATATTTCTATCCATCC
ATCGTTGGTAACTATGTACTGACATGTTTTGTGCATCCGAAAAATGTTAGCATTAGTTTGTGCGCACAGAAGTAATT
CCAGTCACCATATGATGAGCTGATTTATTTATTTCGTAAGTGTGTTCATTATTATTATCTCTTCAGCACCCAAATAT
ATAGGGGACTTAATGATACCTACAAGTAAAAACGGAAGACAAAAACGCCCTGCTCTCTACAGAGGTTAAAATGTTTT
TGCAACAGGGCTCTAGATCTCAGCTGTGAAAGTAGGGACGAGATGAGGCTAGGCATGCAGTGTCAGTATAATACAAT
ATAATCAACATGTCAGCATCTAATGCAGGTGTTGCAAAACAAAATGTACACATGGGTAGTCAGGTAACAGAAAAGCA
TGAAGTAGTAAGGGCTATCTATGCAAGAGGTTCCAAGCTGACTATATACTGAAATATTTAAACACTATGTGGGGCAA
ATAAAATGGACATTAGAACAGTTCGATGGTCAGTTGGGGACTTCTGCTCTTTCTTCCAGTCTCTGAACATATCTTAA
AGCCACAATCATCTATTTTTATTTATTGTTATACATTTATTTATAAGCCAGCACCCCTGTGATTTAAGTTCTGTTGA
AATGCTGAGTTGGAAAAGATCGATGGATGGGGGAAATTTAGTGCAGAGGTTTTGCCCCAGGTTCAAAATCCTTTATA
AAATATTAATACATGGAACAAATATTGAACAATTAAACCACTGATAAGTTAATCAATCTGATTCAAAGTACACCTGT
GAAGAGGGACATGGCAAGAAAAATATTACAGTAAGAACTAGAAACATTCCTTCATGGCTGCTTGATATGGATATGTC
ATGTTTAAGAAAATTCTTCTTTAGACTGTTGAGATTTTTTTTCCTGACAAAGAAGATTCACTGTCGAGGAAAGAAAG
AGGTACTGTGAAATTTGTTATTGAAAACATGCACATACTTTTGTCAGAATGAGTTAAAGAGTGAACAAAATGTGCCT
ATTACTTACGTGTTGTGCTGTTTTAATTCAAGATTAAAATATTTAACGTCCACAGACAAGACCACTTTTATATGAAT
ATTATTTTTCTGCTTTATTGCTCAATTTTATTACCATTTCAAAACACCCGTGTTGCTTTCTATGGCCAAAGATGTTT
AGCACTTTTCATGGTTATACTTCTGTACAGTCCAAAATACAACACTTACTTTACACATACACAAACATCCAATGTAT
TTTGTTTTCTGTCAAGTAAAGACAATGTCTGTGTTATTAAGTTAAATGTCACTTTCAAATACAGGATATGTTGATAT
TAGAATGTTCAACTTTATTTCCTCATTTAAGCAAATTACAGTGTGAAGAATGTAACTGCAGCAATTTATAAAAATCA
TATCACATTCAATTATGAGAGCAAACTTGTTTTGTAGACTTGAACTAGTTTCAATTAATCTTGGAGTTATCATTTCA
AAAATTCTAAACAGAGAGAAATACGGAGTGTAATAATGGTAGGTCTTTGGGTAAGCTGCTTCCAGGAAAAGAAAGCA
ATTATATATGTTCACATAGCACTGACAAGGAGAAACAAAACTTTGGACGGCAAAGAACTTGCATTAGTCTTTTTGAC
ATGTTCCTGTGGTGTGATTTATTACGTAGACAATCAGCTCAACTTCTCAAGTTTGATATCCTTGGAATCATTTGAAA
TTTAAATTTTAATGAAAATTCATTAATTCCAAGGCCAAAAGAAGTGATTCTAATTGCTTTTGAGAATCAGACTATGA
AAGAATTCTTTGGCAAACTTGCACTGTCTTTTCTCTTTTATCATTGGTTGCTTCGTAGGTACTTAATTGAAGGTCCT
CTGATTATCAGCACGGGCTGACATCAGTTCACTCCATGCATTTTAAACAGTAGGCCAGATGTTTAAAGGATCAGCTG
AAGCATCGATAGCATGCTAGGGTGAATAATAAAATTTTCATTATCTACAAGAAGCAAATAAAAAGCATAAGCATTTT
CCCCCATTATCCTGAAGGAGAAGATGAATGCCTAAGCAACATTTTAAGAATGGGTTGAGTGTGGCCTGTGGGAAAAT
TTGGGTAGAAAACTTGTAGTTAGCTAATGTATATACTGTTTGCCTCTTTAGCTCACCATATACCCACACACATGGGC
ATGCATGCATACAGACAGACACATACAATACACACAACAAACAGGAAATTCAGATATACTGAAGAAATGTATTTAAG
GGATTACTAAGTTTTTGTAAATAAAATCCTTTAAGATGCTGAGAAACAATGGAAGAGAAGTAGGACATGATGGCTCA
TACTTTCGTAATTTACTTGTTTAACGTTTGCCAAGGTTTAAATTAATGTAGATGTTTTTGTGGCTAGGATTAATGAT
CTAACAGTTTGGAATAATTAGGCACTTTTATCACCTAGAAAGCCCAGAAACCCAGCATGCAAAAATTCTGGTATGTC
TGCATTTTACACTTAGATATAACAGAGAAATGACAAGTAGTCAAGTGGATAGAGAAACGAATGATTCTTCACACATG
CACACACACATAGAAATTGTCTTTTTAATAGTATTTTAATGTAACACATTTATGCATAATTTCTCCATAGTGTTTAT
CTTATAGTGAATATGTGATGAATAGTCTCTAACATTAGTGGTTTTATAGATTAAACATAATTAAGGCTTTATATATT
AAAGAGTCAATTGGTGACATTCTAATATAAACATGTTTATCTCATATACATTGAAATATTAGATAATTCATTCGTTG
AGAATAAATCGAATGAGTCAAAACTTTTAACCTCCACTTTGAGCTTTGTAATAGTATCCACTGAAAATATTCATGAA
AATTTTTAAGTCATTTCTATTTATATATTCAGTCCAAACATCTCACAAGTTTAAAATGTAAACTCAAGAATATAATT
TCTGTATTCTACAATTGGAAGCATCCATCATATCAGATGAACTTATATAGTTTGTGAAATTTTGCAAACTTTCTGTT
TAGTAAATCTTAATGTCAAACATTTTAACTTCCAGGTTGTCTTTCTTTTCAGTTTTAATATCCGCGATCTTTGTATA
CTCGTTGAATGGATTCTCAATAAGTAACCCACAAATATATATACATACTATGTACCTACAAAAAATAATAAAAAGTA
AAGAAATCGACACTTATCCATACCTGTCCCATAGTAATAAACTATTCATAAGTATATTTGAAAGATATGAGAATCAT
AAAAGTTCGTGTTTGCACCCTTTTGTGCGTGGAATCCTAGGTTTGCATTTTGTGGATCTAGACTTTTTGGAGTGTGG
AAATAAATGAAACAAATAATCGAGACCCAGTCTTATATTCAGGTTATCATTTTACTACATAAAGCATAAATAACATT
TGCAGTTTGTTTCTATGGCTAGCTCTAAAGTCTTAGCAACGAGAACATTATAGAAAGACTTCAACTGTAGCTTCCAG
CAGAACTTCTGAGGTTCCGTTTATGGACTAAGCAGCAGTTGAGGGGGACAAAACTCATAGGCAATTGATCACTCCAA
AGGATAGATTGTCTTTTCTAACCTAATCAAAAGATTTATAGTGAAGGCATATTCAGATTTTGTTGAAGGATATGGAT
ATATAATCATGTGTGTGTGTGTGTGTGTGTGTGTGTTAGACATACTTAAAACATTATTTGAGTAGAAAATTCTGCAC
AAATGGAAAAGTATAACATGTGTTATATCCACACATGTTGAGCATTTACCTGGCTGAAACATCAAAAGCTGAATTGA
CTTAATTGAATGTTGAATACTTAATAGTTACTTTGTAGTGACTCACTATTAAAACATTATCTCAAGCTTTGTCAGAA
TTAATTTTTTTAAAAAACTCAGATTAGTGTCAGGTTTACTGAAACAGCAGATCTGAAATTACTGTGTTTTTTTTTCC
TTTCAATAATCAGTTTCTAATCCAAAATTGAATATCAGTTCCAACTCTACATTCAGTTTCTGTTTTACTTGTTTGGA
CTGGCTTTTGGTTCTGTTTTCCACATAGATCCTCTCTGTGTAAGACAAAGCCATTTGTGCAGATTAAATTTTACTGA
GCGTGTTAACCTATTTAAAACATTCATCCAAAAAGACTAGTATGAATTCTTCATATGGCAAGCTGCTTGTTTTAAAA
CTTCCATTTATTCTAAAATCCTTTTTACTTATACTTTTTAAGAAACGTATTCCCGATATACAAAAGTAACACATGCT
CATTAAAACAAATTAAAAATAGTATTGTATAAAGAGCTGATACATTTCTGCCTTGCCCCATTTAACTTTCTTAAGTG
TTCATGTGAATCATCCATTCACATCAAGACATTTATCTGTATTCATATGAACGTGTTTTAATATATATAACATATAT
AGAATTTTATATAAACTTTCCTTTTAAAATAGAAATGAAATTATATGATATATTTATTCTGTGTCTAGCTCTTGTCA
CGTAATTATTCAAGAACATATTTCTAGGTTAATATCTGTATTCTTAGGTAGCATTCACTAACTCCTCATCTACTTGT
TTTCTTCCATTCTAATTGTGTTTAACATTTCTTCATACAATTGGTTGTCATTTGGTCTTCTTTCATGGAGGGTGCAT
AATGTTCATTCTCACCAATTCTTTACACTTTACATAACTGCTTGATACGAAGCCAGACCTTATAAATATCAACAAAG
CAGGAACACTGTAATCAGCTATCAGTTTCAGTTGAGCTGAATGACCCTGAATATGTGTACACATATTTTCCAGGAGA
TTTTAAAACTGACACCTCAGATTTCTAAGACCTGGAGAAATCAGCATGAGAAACATTGATCTATATTATTCCGTGAA
ATGATTTCACTAAATAGTGAAGCATCTCCCACATGTGGACTCTGTAATTTATTAGAATAAAGAGTTCATGTGCTTCT
GAAGAACTTGAACTACTCTTCTGGCCTCCGTACATTGGTTTCTTAGCTATAGGAAGGCTGAGCATGTTTTTCCTATG
CGTTTCCTTTCTAGCTCATCATTTTAGTGACAAAACAATCTTTCGTGGTGTTGCTCTAGCTATAGAATTGTTTCAGA
TTCATTTGACCAAAGGTGGCAAATACAACAGTCCCAACAAAAACAAAAGACCTATTACAGAATGATGGAAATGACCC
CAGGGAACAATGGCACCTCCACATTTCTTAATTCCAAGGTTATAAGCAGTGGTGTGGACAATTCTCAATTCCAATGC
TGAATCGCCTTCTAATTTCAAATACCTGTGCTAAAAATTATTTACGTCTACTGAAATAATGAACTGGACCCCACCAG
GAATGGCCGATATGCTTGTAGTCAGAGCACAACTGTAGAAAGAAAATAACATTTTAATTTATAGAGGTATGATGATA
GCTGTTTCATACTGTTTTCAGAACGATGAATGGCCTGCTCAGTAGTTTCTTGTCATCGTACTGAGACACTTTAATTT
CTTACCAGCTGAGATGAGGAATACGAGCCCAGTGTGCAGGTGAAATTGGTTAACAGGAGCCATTAAAATTTGGAAGA
GTCAGAATAGCATCAATCAAAATGCTTTCAGTGTAGGAAGTAAACATGTACTAGCCTGACCCACCTGTCTTTTCTTT
TAGGTATGTTGGTAATATTACAATCATTTTGAGGTATCCATAAACAACTGCTTAGATCTGAAGAATTGTATATCTTT
CTTTACTCTGCCCTGGCCTGGGGTTATGGTTCTCATTGAGCTCTAACCTTTCAGAAAAAAAATGTAGAGAAGTGGTT
CAAGAAGAATGCTTTATCTTGCTTCATAAAAATGATAGTGATAGTTTTATTGAAGGCTTACTATGTGCCAGGCCAAA
GTGCGTTTTATTATCGTTCCCATTTTCCAGGCAAAGAAGCTGGAGCACAGAGAGGCTAAGTGAGTTGTCCAGGATGG
CTCAGCTAACATGCTGCAGTTGGGATTTGCACCCAGACCAACTTCTTTTCAACCACTGTCCCATCCTGTGTCTTCTC
TACTCAAAAAGTGTTTCAGCTCCAAACCTGAAACTTTAAAGAAAAGGAAATCCTTAGTGGAAAGACTAGGTTTTAGT
CACAAATTATCTCCTTCCTTACATTATTTGTCTCTTTTTCAAATACTCCAAGCTTTGATTAAAACTGTCTATCACTA
GGAACATTGTAGAATTGCTAAGGTGGAATTGTTAAAAGAACTCAATTCCAATTAACTTTGCCATTGATTACTGTGTG
TTCTGGAGGGGTGTTCTTTCTTTCAGGTTAATGATGCTTTATTGTATATCTCAAAGATTAAAAATAACAATGAAGGA
AGTAGCAAACCGGAACTTCTCTCACAATGCATCTTTCAATCTCGTGCTTTAAATGAAGATAAAATCATGGCTGTGGT
AAGGTTGCAGGAAGGATGATATAGATTAAGTTTCTTGCAAACTGCCCTCTGAATTTTCAATAGCTGTAGAAGGTATT
GGTTTTCCAAAAAATTGACAAATTGAGGATTCATTCAGCAGTTTTTTTCTAGGTCTCTTACCAGAAAGTGATCACTA
AAAAGTGTAGGGAAACCACTCAAAGTTGGATAGATCATTATTTTCACTTAAGCATTTTAATTTCTTGAAGGAGCTTT
ATAATGCAACAAAGAATTTACAGTCCTGTGTCACCGCTTAAATTTTCTAGGGTCATCAGTAAACTCAGTGGAAATAA
ATTAGTTCATGAATATAATTGACCCTTAAATTCTGTCACTGTGCAAGTAATCGGTGGGTCTGCTGGATATGGCTTTC
GAGCAGACAGGTCAACTTCTTCAAACAGAGAAGAAGCATAGCATAAATTGAAGACAAATAACAAACTACTTGTTTCC
TCCTTCTTTGGCATCACCCTATGGATGGAGTATGCATTTATAATTTAACACAATCAAGAGATCTTTATTATCCTACT
TTTGGGTACAACTGCTTCGTTTCTCTTTTGAATCTCTACAGCTATTTAAAAATCTGTTTTGTAAAATTCTTTAAAAA
ACTAAAACATCAGATTCATATTTCAGGTATCTTACTATCTTATACCAACTTAAGCATCCAGTATTATCACCCACCCT
TCCCCTGAGTGAATCCTTAGCACTGGGCTCTTCCTGTTTTATCCCTGTGCATGCTGAGCTCTTTCTGGCCTTCAAGT
CTACTTCCGTTGCAACTGTTGTCTGAATGGTCTCTCTATGTCCTTCTTACTCTCTAAATATTTCGGAATTTAAAGCC
TGGAATAATCTACCTTAGTCCAAAAGATATGCTACACTATTCTAGTTCACAATGATCTCACACTGCCGTTGATACAC
AACATTTAATATCAACTTAATATCTATTTCAGTTCATTACGAGGTCACTTATGCTACATCTTATATTGTTGCCTTGG
ACTTTTATTATCTCTTCATATATGTGTTTATGGTGCTCCCACCCTCACGAGAAGTTGCAAATACCATGTTAGCTGTC
TGATGGCTTTCTATGTTGTCAGGTATACCATTTCCCAACCAGTTGGCATTCAATGATTAAGTTCATTAACAAAGAAT
TGTATGTGTTGAAAAAGATGTTTTTTTCTTAATGAAGCACTTGTTTTTATTTTTTTAATGAAATCCACCCTCTTAAT
AAATTTTAAGTGCACAATACAGTATTGTTAAATATAAGCAAAATGTTGCATAGCAGATCTTTATAATTTTTTTAACC
CTACATGCCTGATAGTCTATACCCATTGCACAGCATCTCACCATTTCTTCCCTCCTCCAGCCCTTAGCAACCACCAT
TGTACTTTCTGTTTCTATAATTTTGACTACTTTAGATACCTCATGTAAGTGGATGCGTGCAGTATTTGTCCTTTTAC
GACTTGCTTATTTTATTTAGCAAAATGGCTACAAGATTCATCCACATTGTAGCATATGGTAAGATTTCCTTTTTGTG
GCAGAATGATATTCCATTGTATGTATATAACATAGCTTTATACATTCCCCTGTCAATAGACATTTAGTTTGTTCACA
CCTCTTGGCTACTGTAAAAATGCTACAATAAACATGGGAATGCAGATATCTCTTCAAGATCCTAAATTGAATTCGTT
TAGATAAATATCCAGATGCGGGATTGCTAGATCTTATGGTAGTTATATTTTTTATTTTTTTGAGGAAACTCCATATT
GTTTTCCACAAAAGCTGCACAATTTTATATTTCCACCAGCAGTCTACATCTCCAATTTTCCTACACCTTCACCAACA
CATGTAATGATCTTGGGCTTTTTTTTTTTTTTTTTTTAATAATGGTTATCCTAATCCGTGAGGTAGTATATCATTGT
GGATTTGATTTGCATTTCCCTGGTAGTTAGTGATGTTGAACATCTTTTCATATAACTGTTGGTCATTTTAATGTCTT
CTTTGGAGAAATATCTATTCAATTCCTTTGTTCACTTTAAAAATTGGGTTGTTCGAATTTTTGTTGTTGTTGTTATT
ACGTTCCTCATGTATTTTAGATATTGACACCTTATCAGATATATGGTTTGCAAACCTTTTCTCTCATTCTATAGGTT
GCTTTTAATTCTGTTGATTGTTTCCCTTGCTTTGTAGAAGCTTTTTAGTTTGATATATTTCTGCTTATCTAGTTTTG
TTTTTGTTGGCTGTCCTTTTAGCGTCATATCCAAAAAAAATTATTGTGAAGACCAATGTCAGGAAATTTTTCCCTTA
TGTTTTCTTCTATGAGTTTCATAGTTTCAGATCTTATTTTTAAGTCTTTACTCCATTTCATTTTGAGTTGATTTTTA
TGTATAGTTTAAGTTAAAGGTCCAATTCCATTCTTTGCAATGTGTATATCCAGTTTTCCCAGCACCATTGGTTGAAG
AGGATATCCTTTCCCAGTTGTGTATTCTTGGCACCCCTATTGAAGGTGATGCTAGGTTTATTTCTGGGATCTCTATT
CTGTTCCATTGGTCTATATGTCTGCCTTTATGACACTATCGTGCGCTCTTGACTGAGGTAGCTTTGGTAATTCATTT
TGAAACTAGCAAGTGTGATGCCTCCAGTTTATTCTTCTTCCTCAAGACTGTTTTGGCTATTTGGAGTCGTTTGTGGT
TTCATATGAATTTTAGGAAATTTACCTTATTTCTGTAAAAAATGCGATTGGGATTATGATAGGAATTACACTGTATC
TGTAGATGGTTTGGATATATAGACTTTTAAATGACACATCAGATGTATTTCCATTTATTTTTGTCATCTTCAATTTC
TTTCAACAATATTTCATAGCTTTCAGCACACACATCTTTTACCTTCTTGGTTGGGTATTTACTAAGTTATTTATTCT
TTTTATTGCTATTGTAAATGAGATTGTTTTCTAAATTTCCTGTTTTTATGTTGCTAGCGTATAGAAACGCAACTGTT
GAATGATGACTTTGTATCCTGCAACTTTGCTGAATTTGTTTATTGGTTCTAACCATGTCTCTGTGTGGCGTCACTCT
TAAGATTTTCTACGTATCAGATCATCTAATTTGCAAACAGATATAATTTTACATCTTCCTTTCCAAATTTGATGTAT
TTTATTTCTCTTTCTTATCTAATTGTTCTGGCTAGTACTTCTGGTACGATTTTGAAAAGAAGTGGCAAAAGTGTGCA
TTCTTGTCTTGTTTCTGATCTTAAGGGAAAAGATTTTCAGTCTTTTGCCATTAAATGTGATATTCACTGTGGGTTTT
TCATATACGGTTTTTATTATGTTGCGGTAATTTCGTTCTATTCCTAGTTTGTTGTGTGTTTTTATCATGAAAGTGTT
GAAACTTGTTAAGCGCTTTTTCTGCAGCTATTGAGATGACCATAGATTTTTAGCCTTTGTTCTGTTAATGTTGTGTA
TCACACTGATTAGTTTTCATAAATTGAACCATTTTTGCATTCCAAGAATAAATCCTATATGGCTCTCGTGTATAATC
CTTTCAATATACTGTTGAGTTCAGTTTGCTAGTATTTTAATGAGTTATTTTGCTTCTATATTTATCAGCGGTATTGT
TCTGTACTTTTCTCCTAGTGTCTTTTATTGACTTTGATATCAGGATACTGATGCCCCTTGTAGAATGAGCTTGGAAG
TGTTCTCTTCTCTTTAATTTTTCTGAAGAATTTGAGAAGGATTGGTGTTAATTCTTCTTTAACTGTTCATTAGATTT
CACCAGTGATGACATTTGGTCCTGGGCTTTTCTTTGTTGGAAGGTTTTGGACTACTGATTCAATCTCCTTACTAGTT
TCGGCCTACTCAGATTTTCTATTTCTTCAAGATTCAATATTGGTAGATTGCATGTTTCAAGGAATTTGTTCATTTTT
TTCTAGGTTAACATACAGTTGTTTACAGCAGTGTCTTATAATCATTTGCATTCTTTTTGGATACCAGTTGTAATGTC
TCCTCTTTCATTTCTGATTTTACTTATTTGAATTTTCCTTTTTTTTTTTTTTTTTTTACTTAATCTACCTAAAGATT
TGTCAATTTTATTGATTTGTTTTTAAAAAAACTCTTAGCTTTGTTGATTTTTCTATTGTTTTCTATTTCAATTTTGG
CTTTTTTCTGATCTAATCTTAATATTTCCTTCCCTCTGCTAACTTTGGGCTTAGTTTGTCCTTCTTTTTCTAAGTCT
TTGAGGAAGAAAATGGCAAGGACATGACTTTCTTTAGCAGTTGGAAGGACAATGCTGTAAATACTCAAAAATTAATT
ATTTTTATAGTGACAAAAACAAAATAAAAAACACTTCAAAGCAAATGAAAGTTTATCATTTAATTTATCAAATCACT
AAGCAGACTGCTTGATCAGAGAGAAGATACTCATATGATCACATAAAACTGAAAGATTAAGAGGTAAGGACATTCAT
GTTATCATTACATCTAACTTTCTTATTTCCAAGATGGAGAAACTGAGGGTTGGAGAAAAAGAAAGATTTCTTTGTTA
GATACAAACAGACAGGACTAAACTCAGTATAGCAGCCTCCTAAATTCCAAAGTATCATGATACTGTGATTTTATGCA
TTCTTCAGAAAAATAGTAGAGCCACTGGATTCTGGCAAAGAAGTTATATAAAATGTCAAGTTCTTCCTTTGCCTCAG
AAATGAAGTTTTATGTTCCAAAATTGATTGGGAAGTTCTCCTTATACCTCACATCACGTCTACTATTTTACATTGTT
TACTTTTGAAGAATTTTTTTAATTGACAAATAATAATTGTACATATTCATGGAGAACCTAGTGATGTTTTTATATAT
GTAATGTATAGTGATCAGATCAGGGTAATTAGCATATCCATTATCTCAAACATTGGTCATTTATTTGTGTTGGGAAC
ATTCAACGTTCTCCTTCTAGCCATTTGAAACTTCTATATTATTGCTAACTATAGTCACCATTCAGTCGTATAGAGCA
CTAGAACTTATTTCTCCTATCTAGCTATAATTTATTTTTAAATATGCTTTTTGAATCTGTTACTATAAATTGAATGT
CACATCGTTTTGAAAATATTCTTAATTTATGCTCAACAGGCAAGATTACACACCTGTGATAATATCTTTAATTTAAA
ACATTACTCTGTTTAATTTACCAGAATATGGAACCCTAGTCATTTTAGAGGTGGAGCAAATTTCAGTGATAATCTAG
TGCAAATTTCTCATCTTATGAATGAGGAGATTGAGTCTGATATAAGGGACGAGATTTTCGTCAATGAGCAGCTTGTT
AACATTAGCTCTGTGATAGAACACAGGCACTTGTCCTCCCAGGCCGGTGTTTCTTCTACTCTATGATGGGCTGTTTT
GTTGTAGTTTTTAAACAGCAGCATTTTCACCATGCATAGTTTTCTTCCAAAGTTCGTTCTTAACGTTTTTGCACAGA
ATAACTAGATTTTGGAAGTAGAAAAAGGAAATTCTCTTTGCATCCTTGTATCTCTGGTTATTTTCTTTGTCCTTTGA
TCTCTCTCTCCTCCCCTCCCCTCCCCTCCCCTCCCCTTCCCTTCCCTCCCCTCTCCTTCCCTTCCCTTCCCTTCCCT
CCCCTCTCTCACACATTAGAGAAAGAGTTAAGGTATTAAAGAATACATAATACTATTAAATTTCCTTCACATAGAGA
AAGGAATGAAAAAAAGTGAAAAATGGTCCTCACCAAATGTCCAAACTTCTGTAGGTCATTTCCATAGTATCAGCAAT
GTCCTGTATGGTGCCTCGGGGATATGTAAGCAAATGAGCAAGTGGTTAGCTAATTCTAGCTTTGGCAAACACTTGTT
ATGGCTTACTTGAGGAGAAGTCACTTCTCCAAAGTGAAAATAATGTGCACAGGTCAATTAGAATTTTTTTGTAGAAA
AGGAAAATACTTTGTAGGGACATGGATGAATCTGGAAACCATCGTTCTCAGCAAACTATTGCAAGGACAAAAAACCA
AACACCGCATGTTCTCACTCATAGGTGGGAATTGAACAATGAGAACACATGGACACAGGAAGGGGAACATCACACAC
CGGGGCCTGTTGTGGGGTGGGGGGAGGGTGGAGGGATAGCATTAGGAGATATACTTAATGCTAAATGACCAGTTAAT
GGGTGCAGGACACCAACATGGCACATGTATACATATGTAACAAACCTGCACGTTGTGCACATGTACCCTAAAACTTA
AAGTATAATAAAAAAAAAAAAGAAGAAAATACCTCCTTATGCTCCTGACTTATTTTCTTTTTGGTTCCTCAGTCCTC
TTCTCTCTCTCTCTCTCTCTCTCTCTCTCTCTCTCTCTCTCTCTCTCTCACACACACACACACACATACCCCACATA
TACAATATGATTAAGGATATATGTGAATAATGAAAGCTTCTTGTGTATAGATTTAGAAGTCTAATGGACAAAATCAA
TATTTTCCTATGTGCATTTAATTCCCCCCTTTGATTTAGGTATATAGTCTTTTTTTAAAAAAGAGAAAAAAAATTAG
GTGACCTTAAGGTATAGATCCTACTTTCAAAAGGTTTACAGAACTAGGGAGAGGAACATGGACAAGATTTAAAGAAC
TATTTTAAGCAGAATAAAATGTGATTTATGAACAAAGCATATATTATTTGTGCGTATGTGTGTGTGCCAACAAAGAT
GCAATTAGGAGATTGCACAGGGAGATGTCATTAGAACCAACCTTAACGGGTGAGAAGTCTTTGAAGACATTTAGAAC
ATGGAAGATCTCTGACAGAGGGAACAAAGGCATAGTGACAAAAGTCAAGGGCATATTTAGGACTGGAGAGTGGTATG
TGTGGCTTGAGAGTGGGCGAGAAAAAACAACAATGCCTCTGTAATAGGAAAGTAGACAGAGGCATGACATTAAGAGC
TTTGCCAGCTGTGCTAAAAGTAGTGAACAAGAGCTAACAAAGTGAAGAAATGTACCTTTTCTGATGTGTATCATTCC
CTTATTCATATACTTCTTGAGGGGGAAATTCATTCTGTGTTGATCTAGTAAACTACTACAGGACCAAATGATAAAAA
GAAGTATAGGAAAGAATGTTTCAGCATACTTTACGAGATAACTTCCTTGTAGCTATTCTCCATAGTATTTTGAGCAT
CACAAAGCAATGAGCTGAAACTGTCTAAGCCAAAATTGACTTGTCATCTGTTAGGGATGCTTAGATGAGAATTCTAC
ATTTGAGAGCTTCTTAGATTCATTGACCACTATGTCCCATTCTAAGATCCATGAATGCGTGACCTAACTATTACACC
TTCTTTTAGTCTGATTGTCAATTTTGTATTTTCAATTGTGCAAGTTTCTAAAACTATTTTAGGAAGATAAATCTAGC
AGTGGTGTGGGAATAGACAAGAGAGAAGGGGAAAGACTCTTCAGGAAACTAAACTCACAATTTATGAGTATTCTTTA
TTGCCCAAGTCTTCCCAAAGTCTTTCATCAAGAAAGAGGCATTGCAACTCTCCTTTTATAGTTTGTTTTTATTCTGG
AGCAGTGATGTTTTGGTGGAGTTGTTCCTCAGTGCGTAATTAAAGGGCCTATGACAATTACAGTTCATCTCCTGCTG
CTCAAGGTACTGCAGATATTTGGATCTACTACTCTCATTCATTTCCAATTAATGTCAGCTTTAGATTTCCTTCAGTA
TGCTATGTTATAAAATTTGATTATCGTTGTGCCCACCTTCCCACTTAATTTCAAGCAGGTTTCTCGATTACCTGACT
AAACTAATGAAATCTGACTAACCCAATATCTGTGGACAGTAGTGTGATGTTACTGATTTTTGTATGATTAGTCAAGT
CATATTCATGCCACGTTTTCATATAGTACCATAAAGGATATTCTTCTCGTGGTCCTTTTCTTTTATTCTGAACATAC
AATGAGAAGACCGGTAAAGTGGGCTAGGAAATTAAAGAAAAATACAAATGGCAAAAAATATGGGTCACTCGAAGTCT
AGAATAGAGAGCACAATCAATTTTGAATTAAGGGGTGATAAGGTGATTTGGTCAGGTGACTGGTGAAACAGGAAAGA
AACTATACTTTTTGAAGTGTTTCATCCATGTGTTAAGATTCATTTGGGGTCAAGAATCTAAATTTCATATCCCTGGG
AGTGGAAACTAAGTAAAAAAAAAAATTATGGACCTTGGTTTAATAGCTAGAGGAGCAAGAGTGTATCTTTATGTGAC
TTAACTTCTATGTGAAAAGTGAACCTTAAGATTAATTATTGGGGGAATTTACTTACTCAGGTTCTATGCCTAGATGG
TCTGCCCAACTAAGAAAACTTATTTTCCTGTTACTCCATCCTATTTTTCATACTTTTATACTGCACTTGCAGAAAAG
CATATATTTCTACCCAATACGAAAATTCCTGGGAACATATTTTTCTACATTTCCCAAATTACTTCAAAAAGTAAACT
TAGGTTATTTCATGATCTCCATTACAATGGACAGGTGGCCTTATTGAATGTTGTCCTGTGAATACAAAGATCCAGAG
TTTAAAGAACAAGGTGTACTTGCATCTCCCACTTAGGGTTTGCTTGTGGTGGAGAGAGAATCTAGTTTGCTTAAAAG
GATGACAGTGCAGTGCCCCAAAATATCTGATATCATTAAAAGTCTCATATTTGTCTTTCGTAACTTCTCTAGGGCTG
TCGATGACAGGAGACCCTTAACTCCTATGCCTTGATTATGTGAATAAGCACATGAAAATATTTTAGTTATCTTAGTT
CACTTTTAAACTAAGTTTCAATTATCACTAGATTCTAAATATCATCATTGAGCCGTTCTTAAGGAACTGATTTTCTA
CATATTCATTCACTTCACCTATATCTAGTGTGTCTACTATTTGCCAAGAAAAATTTACTCTCTTAATTCAGCATTCC
ATATACTTAACATCATAAAAAGTAGGCCATTTTTAGTTTTCTAAATTATTTATTTAAACATTTCTTTAAAATTACAT
TCTATCATTACACTATATTTCAACACTACAGTAAGCAGCCTATTTTGTGATTTTTCCTTATATAAAATACATAATTG
AAATTAAAAATGAAGTTACCAAGAGCCATTTTCACTCTGGGGAATGCACATTTATAAATTATGGGGTTATTTTTTCT
TCATCAGCTTTCATATTATTAAACTTTGTCTCTTCATAATTACAGAGATGACTAGACACAGAAGGGAATTTAACATT
TGGTGTGCATTTGTCTAACCTATACTTTATGTTAGAAAATACATTTCCATTTGAAAAAAAATCAGTAATTGTGGGTG
TGATCAAGAGGGCAGCCTGAAAGTCGGGTGATGTGACTCACACCTGTAATCCCAGCATTTTTGGAGGCCAAGGTGGG
ATTATCGATTGAGCCCAGGAGTTCAAAACCAGCCTGGGCAACACAGTGAGAGCCTGTCTCTATTAGGGGGAAAAAAA
AAAAAAGAGGAAGTTAGCCTGAGGCAATGTAAATGAAATACATATTTCAAGGATATTTATACATGATTCACGTTATT
CATATAAAGATGTGCCAGAGAAGACTATAGGTACGTTATTTTACACTATTTTGCTAGGATTTTAAGAAATTCAATGT
GTTTTTATTTCAGTTAACTTAGAAAACTTACCTAACTTATACTTCTCATGGACACAAAAGTTTTTAAAGATAGGATC
AAAAAGCCCACATGGTGAAGCATTTTGAACTGGATGAAAAACATCTATTATCTTTAAAATTTTATGATATTACTGAT
TGTAATAGACTCCCTTTTTAAGAAATCATTCCTTATAGAACATAAGGTTTACATTTACAATCAACAATTTCTATCCT
TACTACAATAAAGGCACATATAAAAAGTACAGTTGCATATTTAGCAGGTTTAATTGTACATTTTAATGTAGAAATCA
ATTCAATTCTTTCATTTATCAGCATTATTACAGTGATTTCAAATTAAGCATAGGTAACTTTGATATAGATAAATGAT
GTACACAGCAGTTAAATTTTATTTTCAATTATGTAGTAATTGTATAACCTAGGCAGTATAATTTGTAAACTTTGTAT
TTTATTATTATGCTTCTCCCACTTGGCATAAGCACAACACTTCCTAAAAGCATAATTTTCTATAGACTTAATAACTC
CCTAAAAACCTGTTTTGGACCCCTATACTATTTGATATAGGCAGAAAAAAAACATAATCCATGCTCAAATTTGAAAA
ATGACTGGTCACATTTGGTATAATACTAAAGGTAAATAAAATCAAGAGTCTATGAACATTTCCGGACCTGCACATTT
GTTTTATTAAAATGCATAATTGTCTTTAGTGTGTTTCTATTTGTTTATACTCTACTGATTTTAATTAAAAATACCAA
AATACGTTTATTAAAAAACTGTCAGAATCTAAGTTGTTAAATATACTTAACTAGGAAAGTAACTGTTTAAACGAGAT
AATTTATAGAGAAATGTGGTGTATTGCCAATTAGATGTCAAGATACAATACAACTGATAATGAAAAAGTAGCATTTT
CTTAGGGATGGAATACAGTGTAAGGAACACCCCAGTAAGAATACAAAAATTACTGAAAAAAAATCTTCCTTCCTGAA
AAACCAAGTGCCCTTCAAGTGCAGAACCTCATCCAACTAATTGTTAGGTATCACTAAAGCCTGATACCTTCAATTTT
CTGGATCATTCAAGCTGTATTTTTGAGTCCTTATACTAGAGGAGGTAAAGAGCTATAAAAACACTTAATGGTATCTG
ATGTGAACTGTGGATCACTTTGACCCATCACTTCTACGTCTACATCTTGGATAAATTCCCATTGTTGTCATAGATTG
TACAGGTTTAATGGTGCGTTTGTGGAGGGGGCTCGCTTATAGAAAATGGAGACTCTGAAGGGATAAGGAATAAATGT
ATCACTTCAGGTCTTTTATTTGAAATTGGGGTCCAGAGAGCCTTTTTGTATCAGACTTGTCAAACCATTTCCATTTA
GTAATTATATATGCACTAGCACTTATTCCTACTTACCTCACCTCTTTATGCCCATTTCCTTGTAGTTGCGGTTATGC
ATGAATAATTTATTGCACCCCTTACCAACAATGGAATAAAACTTCCATTCTGAAAGCTTTCCATACTCATTTCCAAT
AGCAATAGGGTTTTTTTAACGGACGTATTACAAATGTACGAGTCAGTTGAACATAGTATTCCTCTTTGTAAGAACTC
CAAGTGGATGCATGCTGTTGTCTCAAATCTCAATTAGACCTTGCTTTGAGGTCCCTTCATTGCCAGTCATCTGTTCT
CCTTCCCCTGACTTGAGTATTTCTCCAGATATAGATAATACATTTTCCCAACTCTGTGTTCCAAGAACTGACAGTGG
CTTTCATTCATTTTGTTTGTTTGTTTGTTTCTTCTCGTTCTCAAGTATCCCGCAGTCTACTGTTTCTTCCCTCCATT
CGTTTGTCCTTTCAGAGTTTCAAAATCCAGCATAGGTACTTCTTCTAAAATGTCTTACCCTTCACATACACACACCA
CTTGAGACCCCATCAGCCTCTGTCCACACAGTTTGGTTACATTCATAGACTATTTTTATACATCAAAATATTTGAAA
ATTTTAGGGTAAATCTCAGTAGTCATTCATTTTTGCTCTTATTCAACCAATACTAGTCAATCAGCCTGTGCCAGGTT
TTGTTGCAGGTACCAGGTATCCATCCATAAAGAAAACAACGTCCCTTTGTTGTGGAATTTACATTTTAGCAGGGGAG
GCAAAGAACCCAATAAATATGATAAAATATCAGATTAAAAGTACGATGAAAAAAATCATCAGGGTAAAGGAAAAAGG
GAAGCAGTATTTTAGCAAGAGTGGTGAAGAGAGGAGGCTGAGAGTGTGACATCTGAGCAGAGACCTAAATCAAGTCA
AGGAATGAAACATGCTACTATCTAAAGAAATGAGTCAGGATAAGGAACTAGTAAGAGCCGAGGCCCAGAGATGTGAA
TATGCTGTTCCAGGAACAGCAAAGAGACTGGTTGATATGATGTGAAAAATGAGAAGAAACCTTATGATATGTGTCAA
GAGAAAAAAAAAATTTAAAAGCATGCTTGGGAACGGAGGCCTCCAGATGAAAAAAAAAAACACAGTTCAAATCCTTG
TTCATGCATTTAGTTTGCTTTGCAATCTTGGGCAAAATGTTAAATTTCTGTACGTTTTATCTTCCTCATTTTTAAAA
TAGGCACAAGGACATCTACTTAATAGGTTCATTGTGAGGAGTAAATGAGATGATATATCTAGGATGCCTGGCATTAT
ATCATACACTTAATAATACACTGAATAAATAATAGTTATGTCTATTTATTTCCTTATCGTTTTTATTATTATTTCAA
TGCACAGACCTGTTCATAAGATAATGATAAATATTAGTGGCAGAAACTGAAGATGTTATAAATTATTAGGAGGCGGG
ACCACTCAGTTCAATGTATCTGTTTTAATATAGTCAGCAAAAGTGTGAAGATACCAACAATTAAATTTCAATGCATT
CTTCCATTTCACTAGTTTTATAAACTGATGAACTACCAGAATGTCAATGTATGAATTGCATACTCATTCTTAACAAA
CAGATTTGCAAAATTATGTGTAAAATTAGCCCTCAGCCTTCCAATTTGTTATTGTCATATTTCATGGAAATACATAA
TCTGTAAATTTTTGTTTTAATGATATGTGAAACTGCCTAAAGTAGAGTCTTGGCAACTACTTCACATTTGTCCTCCA
GAGATAGTGGATAAAAGTGTCAATAAATGAACACTCTATATTCACTAATCACAGGCAAGGGACAAGGAACAGAGTGG
TCACAAAATACCACAAAATTAAAGCACATTCCAAATTAAATATATATGTTTTTATTACAGATAATGTTTGCTAGACT
CTTTCTAATTATCTGCAAAGATTTTAGGAATGTTTTAATGTTTTAATATTTACACACCTGTGTATTTCAAGTTCAGT
CAAACACTATTGTTAAAACTAAATCTTCTCATCTCTAATAATAAGATGTGAACTTATCTTGGAAGGTGGTTATTAGG
ATGGGAGAGATAATGTATTTCATTCAAAGTAAAAATATTTCTCTGTTTCTATCTTTCTCTTTCTCTGTCATCTATTT
ATCATCTATATCCAGGTATCTATGCACCTATGTAGACTAGCATTCAATGAACCATAGATATTATTAGTAGTAGAATT
GTTACTAATATTAAAATAAGAAGTATTTAAGAAGAAACATGTCCTAAAGCATAAGGTCAATTATTACTCTCATGTTT
TTTGGCATATGAAGCCTAAAAAGTGTCAATTTCAAGAGAGTATTAATAAAGATTGTGATAACTGAAAGGTTCCTGCT
TGAAATTTTGTGTGGTCTTACAAATATATAAACTCTAAGCATTTCAGTGAGCCAATTACTGACTAGGCACTATGTCT
TATGACTCTTTTGTCATAGTATGTAAAAAACAAAGAGTAGAGACATCATAAAAATTATAGTAGATGGGCACTAGGGA
ATTACGCAAAATAATTTGTAGATTTAATGTGAAACCAAAACATCTGTTCAAGTCAATTTCCCACAGGTCATGTGGCA
AAGAGTATGAGTTCCAGACTGAGGAGAGGAAAAGGTTGTTCTTCCACAGGGAAATAAACTGAGTGTAATAAACATAA
TTTTTCTTCTTAAGCATTATTTAAAACAAAAAAAATGCCATTAAATCTATCTTTCCTGCCTCTCTTATCAATGCTCC
CTTCCCTTTCACCACTTGTTTCAAACTCCAAGCCTTGGGATTTTATTTTGGCTTTTTGCCTTAATGTAACTAAAATG
AGAGCATCACAAATATGAAGCTCATCAAATAATTTAGCAGCATTTTCCCCTGTTTTTAACTTTCTCTTTGGAAACGT
AGATTTCGAAATTTAAGGGCCCAAAATATGAAATGCAATTATAATAGGCCATTTGTTCATTCAGCTTGATAAACTTG
AATAAATAGTATTGAACTTTTAATGCAAAAAGAACAAAACAAAATAGAACTCTCCACGAAGAAACTTTTCAATGTTT
GCATTTCTGTGTGAGGAGAAGGGTAATGAATGTGGGAACCTTAATGGAATCCATGTTCTTCCAGTGATGACAAGGGT
CAAAATGGAGAAAAATGGTCACTTTCTACCCAGTACATTATATTAGTTCTATGTGGACAACTATAACATAGCTGATG
CTGGTTTTCAGGCCATAAATGTAGGTATGTATTTTCCTACTATTTATAAGGCAAAATTTCTATTTGTTTAATGATTT
CTATATAGGTAGATTATTCTGTCTTTAGGATTAAAAACGACCTGTAGACCAAGAGACTTTCTAATGTCCACCTTAGA
GTATATGGCTTTTACTGTTACAGTTTCCATTTCCTTTGCTTGCCCCTTTGAGAGAAGGAAAGGAGACATTTGGGATA
CATACATCAATGAGGAGCTATTAATGAATAAATGAATGAAATTGTCAGTCAATTTATCCACATGATCATCAATTGCC
AATAATTTTATCACCTCTGTGGGATTAAGTAGAGGTAACAGTTTAGAAATTTGATTTTTTGAAAGCATTTAAAATGT
TCAAATATATCACTCTGGTAACTAAGGGAAAGTGTATTATTTTCTTATGCTTAGTCTTATTTTGGTTTTGCCTTTTT
AATTTAAATTGAACACTTATATCAAAGAGCTTGCAGGATTATAATTTGAATTTTTGAAGCAAAGATCATTTTCTTAA
CATCAAACAAAGAGTAGATACAATAGGAATAAAATCGGCAGAAAAACAAGAGTATCAAGGACAGACGGGGAGGGTGG
GTCTGTGTTAGCATGTATTGCTATGAAGAAATAGCCGAGACTGGGTAATGTATTTTTAAAAAGAGCTTTAATCGATT
CATGATTCTGCAGGTTGTACAGGAAGCAGGACACCAGCATCTACTCAGCTTCTGGGGAGGCCTCCGGGAGCTTTTAC
TCATAGTGGAAGATGAAACAGGAGTAAGCATGTCACATGGCCAGAGCAGAAGCCAGGGGGAGGTTGCCACACATTTA
AAAAAAAAAAAAACAAAACAGATCGCTCAAGAACTCAGCTGCTATCATGAGGACAGCATCAAGCTGTGAGGGATCCA
CCTCCGTGACTCAAACATCTCACACCAGGCCCCAAGTCCAACACTTGGCATTATATTTCAACAAGAAAAAAAGTTTA
ATTGGCTGATGGTTCTGCAGGCTGTACAGGAAGTGTGGCACAGGCATTTGCTTGGCTCCTGGGGAGGCCTCAGGGAG
TTTTTGCTCATGGCAGAAGGTGATGCCCACACACTTTAAAAAAAAACCAGATCTCATGAAAACTCACTCACTACACT
GAGGACAATACAAAACCATGAGGGATCTGTCCCCATGACCCAAAAACCTCCCGCCAGGCCCCACCACCAACATTGGG
AATTATATTTCCACTTGAGATTTGAGTGGCGGCAAATATCCAAACTATATCAGGGCTCATGTCCAGTTATATGTCAA
CATGCCTGCATTCGAAACATCCTGTCCAAATCACTGCCTTGTCATAATACTTATATTTTTCTTTATTGAATACGAAC
ACAAGAAGATTAAATAATAGCATTTCTACTTTAAAACAGTGGGCACCATATTAACATTGGAATAATAGTAGTAATAA
CGATAGTAATAACAATGATATAGGCTGGGTGCGGAGGCTCACGCCTGTAATCCCAGCACTTTGGGAGGCCAAGGCGG
GCGGATCATGATGTCAGGAGATCGAGACCATCCTGGCTAACACAGTGAAACCCCGTCTCTACTAAAAATACAAAAAA
ATTAGCTGGGCATGGTGGCAGGCACCTGTAGTCTCAGCTACTTGGGAGGCTGAGGCAGGAGAATGGCGTGAACCTGG
GATGCAGAGCTTGCAGTGAGCCGAGATCGTGCCACTGCACTCCAACCTGGGCGACAGAGCGAGACTTCATCTCAAAA
AAAAAATTAAATAAATAAATAAATAAATAATAACGATAAAAGGATATGTGTAGGTTTTTTTTTTAATAGGCTGTTAA
CATTAATAGGCATTGTGATTTCAGGGATATCATCAAACATCCTGGTCCTAAGACATCCCCTATTGAATAGGAAGGGC
TTAAGTTAAACTTCTCATGAGCCACAATTTTCTGATTATATGTTTGGTGTGTGTAATAGCCACCTCAGTGATGATTT
GATTAGCCTGGACCCTTACATAATCATTGAAGTATACCCATGTTCCTTTATATACTTCTTTAGTGTTGAAAGCTCAA
AATTAAGCAAAATAGTCCCCTTGATAATGTTTAGATTCTTAACATTTGCTTTCTAAAGCTGGCAAATACTCTCTTCC
CAGTGTCATGAAGTTAAATAACATGTTGCTTAGTGAGGACTTTAATGTTGCCATGCCATAGGAAGACCTTATTCGAA
ATCCCCTTACCTGGGAGAATGTCAGATTATTACCCCCCAACTTGTTTAACACTTTTAGGATTTTAAAGGTGTTCACA
TTTGTATTAGAACAAAATACTATTGAGAAACATTTCTAGAAAAAAATTATCTTTCCAAATTAAAATCAGTGGTATGT
AATGTAGGAGTCTGATTATAATGATTAAAATACATGGGCTTTGGGCATACTGCCTAGGTGAAACTCCTGGTTTATTG
CATCACTATTAGTATAACCTATGGGAGTTAACCTACGTAAGCCTCAGTTAATTTTTCTCTCAAATTGATCTAATAAT
CGTCTCTCATAGGCTTGTTTTGATAGATATTTCAGTGTATATAATATACTTAGGACAGTGCCTGATATCAGTAAGTC
TCCTTATATGCTATTTTTCTTTCTATTTTAATTATTTATGCAAGAGAAACTATTATGCTTTAACTCAATTAAAATAA
AATGCCTTTGTATTTATTCATGTCAAAGGAAATATGCAAGTATTGCATTCACTTCCTAGGTGCCTTTTTGAATTGAG
CTTTGCATGGTTAGTTTGTATAAAAGGTTCAGTGAACTTTCTCATAATGATTTTTTATTGAACATATGGAATCCATT
AAGTGTTAGCAAAAGTCACTATCCACTGAGCTGTGTCCAGGGGCTGACAGTTATGTCTATCTCTTGCAAAAATAAAC
ACATACATAAATGCACTAAGACGTATATTACCTGTCGTCATCTCTTAGAGCATTTCCATTTTTCTTTTAAGTTTTTT
CTTTCAATGGGTTTTTTATCTTTGTGAGTACATGGTAGGTGTATATGTCAACGGGGTACATGAGGAAGGTGTATATA
TTGATGGGGTACAAGAGAGGTTTTAACACAAGCATTCAATATGAAATAGTCACATCATGGAGAATGGGTTATCTATC
CCTTCAAGCATTTGTGCTTTGTATTACAAACATTCTAATTATACTCTGTTAGTTATTTTAAAATGTACCATTAAGTT
ATTACTGACTATAGCAACCCTATTGTGCTATGAAACAGTAGATCTTATTCTTATTTTTCTAACATCTTAGAACATTT
CCACAAACACTACCTGCTTGTTAAATATACCTATTCTAATCTTCATATAATCAATTACTTTTTTCCTCTAGAATGTA
CTATGACACATCCATGGGGAAAATGTAGTAATCTAATTAAGACTATTTCCTCTCATTTTATATTTAAAAGAATGTGC
TCTATCAATTTATTTACTTGTACAGCCGTAGGCAACCTCTAAAATATTTAAAGTTCTTAAAAGTCAGATATTTCAGT
TAATATTGTGATTATATAGTTGATTTTGATGAACATGTTCATCTACCAGAAATAAATTATACACACACATTGATATG
GTTAGGCTTTCTGTCCCCACTCAAATCTCATTTTGAATTATAATCCCCGTGTGTCAAGGGAGAGACCAGGTGGAGGC
AATTGGATCTTGAGGGTGGTTTTGCCCATGCTGTTCTCCTGATAGTGAATCATGAGATCAGATGGTTTTATAAAGGG
CTCTTCCCCCTTCCCTCCTCACTCATTCTCCTTCTTGCCACCTTGTAAAGGAGGTGCCTTGCTTTCTACTATGCCCT
TTCTACTATGCCCTTCACCTTCTACTATGATTGTAAGTTTCCTGAGGTCTCCCCAGCCATGCTGAACTATGAGTCAA
TTAAATCCCTTTCCTTTATAAATTACCCAGTCTCAGGCAGTTCTTTATTGCACATATATGTGTGTGTATGTGTATGT
GTGTGTGTGTGTATATGTATGTATATATGTATACATATGTGTGTATATGTATGTATATATGTATGTATATATGTATA
CATATGTGTGTATATGTATGTATATATGTATACATATGTGTGTGTGTATATATGTGTACATATATATATATATATAT
ATATATATATATATATATATATGAACAGAGAGAGAGAGAGAGAGGGAGGAAGGGAGAGAGGGAGGGAAGCATGGAGA
AAGAGAGAGTAATAGCCTAAATAGAAATAAAACTAGCTCCAAGTACAGGTTCGTCAACACTCTCCTATCATACCCCC
ACCAAAGTTAATGTTAACCACTTGGAGCCCTGTTCTTCCTTAGTTGTGGAGTACTTTAGCAAAATTTTAAATCTAAT
TATGCCTAATTCAACGACAGTGCTAATTTGAAAGTGTTAGAAACTGAAGACCTATAATAATAATGAGAGTTACAAAA
CATAAATAGTGAGACAATGATGAATGTAGTGGATGCATGTACGAGGGCTATCATTTGACAGTAGAGATGATGCTCAA
GGACAGACAATGAGTCTTTCAATGTGTGGAGAATGTGCTGCTGTTACAGTGATGTACAGGAAAGAAACAAAAACTGA
GGAAGTATCAGTAAACAAAACACTCAAACATATGAGTATACAGCTAGAATAAAAGCAACAGTACTAGATGACAATAA
GCCCAATGTTAACTCAGAAAGCAGAAGGTTTTTAAGAATTTGGGGAATACTGTGGCTGATGATACTTATGTCTCAAG
CCACAGATGCCATATGGGCTCTGCGCCCAGTTGAATCGGCACCACCTGGCAGTAAGTGGGCAGGTCCACGACTGCCA
GGACATCCCTTCCAACACTTGTGGAGATCACCAGGAAGGGGGGAGAGACCTGCCTTGACAGATTTTCAATGTGGGCG
AAACAGGTCTATTTTGAGAAAAGATGTTCAATAGAACATATGTCAGCAAGGAAGAAGAGATGATGCTTAGTTCTAAA
GCTCCAAAGAGCTGGCTTACACTCCAACTTGGGGAAAATGCATCCGGGAAATGCAAGATTAATCTCATCTTAGCCAT
TCTTTTGAATGGATGGACATGACCCCTTTCTACTTGAAGACAGAAAACATAACCATATTGATTTCAGGTTTTCTTCA
TTGGTTTCCATTTAGGATTGTTCCTCCCCATCTTCTTTCTGTGTAGGCATCCCAGTTCCCAAGTGTTCATGAAGCAC
GTATGGCCTTCAGGGGATGTGTCTGTATACATTGTTATCTTATGGATGCACGGTTTTGTCTGCACCTTGGTTCTGAA
TGTCTTTACTCTTGAGCATCTGCCCATGGGTCCCCTTCTCAAGGCCTCAATTTCTTGAGTTTAACACTGCATGGCCC
ATGCAGCTTTTCAGTTAAGCATCTCTTGCTATGACCAACTCTTTTCCTCAGTCAACTCCCACACTCTTTTCAGGGAC
AGGAAAAATGTAGCCACTTGCTGGCTGCACTCTGAGGCCTCAAGAAATTTAGTGAATCTGCCTTTGCCCTTCTTGCT
GATGAAATACTGCCACATCAGGCCCCCTCTTCGGAAACCTACAAGCATCTAATTTTCTTGCTTCCTCCCCAACTTTC
TTTTTGACTCCCCCCCATCCAGAGAGTTCTTATGTCTACTGTACTAGGAAAAACTCATTCTTAAGGTATGGTTTTCA
AATCATTCTCTGGTCTGGACTTTAGCTACGGTTTTAAATGAAGAAACAACCCAGAGCCAAAATATAATGAAACTATT
TCCTTCTTCCACAGAGTGGAAACTGCTTTGGGGTTAAAGGGCCAGTGAACCAAATAGAAAAGGATCTCAGGGAACAC
AGATTGAAGAGAGAGAAGAAAAAATATGAAGGCATTGTTGGTTCTCTTTTGAGTTTAAAATCTAGTGGGGATTGTAA
GCACACACACATATACACACACACGCTTACACACACACACCAGTGAAGTTATGAAGGATTTTGTCACTCCAACGACC
TTGAATTTGATTATCTAGGTCAGTTGTTACCAAAGTGGAATGTACATGCCCAATAATATGCGTGCTAAACAGTTGGG
GTAGTGAGAAAAAATACTTTTTATTTATCTTGTTCTCTAGAAATTAATATTTTGATTGTATATTTTATAGTGTATGT
GATGTGTAAGTTGTGTCTACAAAACTAGTGTCAATGTAATTTAAAATTACATATGTCTGTGAATATATATTTATATA
GGGTACATGCTTAAAATGTGTTTACTTCTGAGGTACATGAACATTTTTCCCCCAGGCACAGAAAGACAAATACCACA
TGATGTCACTTAAATGTGCAATGTAAGAAAAGTTGAATTCATAGAGATGTAGAGTAGAATCATGGTTAACAGAGGCT
TGGGAGGTGGAGTGAGGGAATAGAGAGTTACTGTTCAAAGATTACAAAGTTTCAACTAGACAGAGGGAATACATTTT
GAGATCTATTTCAGGAACATTTTGAGACCCTCACTCTAAGTAATAGGAAATCATTACTTTAGTTAACATATTTGAAT
ATGAGTTGTGATGTTCTATATCGTTTATTTGGATTCTACTAACCCACACCTAGATTTTTATGGCATTACCTTTTTAC
TCACTGTGAATATCCTACTCATAGACAGATGCCCTGGGAACTTGGACTTGAGGCACCCAAGAACTGAGACAGTGAGA
TTTGGGGGCACAAGGATCTATGGATAAGTTCATCTTAGTGATGATAAAATCAATTTGGCATGTTTCACGGACAGTGT
GCATTTTAGAAAGGGTAAAGACTTGGAAACGGGATATTTTTGAGCCCAAGTGTTTCCAATAAATAGCTGTATAATTT
GAAGCAAATAATTGATTTTTTGTTCTCTTTGTGCCCTCGCCTGTAAAATGGGAGAAATGTATTCCTTTCTCATCCTT
CTCATGAGGCCATTGAGAGTATCTAATGAGATCAGACTGTGACATAGCATAATAATTCTCATTTCTTGAAGGCCTAT
TATACACTTTGCAAGCACTGTATGTGTTGTTTCTACTTCTCTTGTTCGTTTTTCCTGGAATAAATATCCCCCCCTCC
TTTACATTGGATTGCCATTATTCACCCTGTAAGGAAGGCTTCATGGTTCTCATTTTCATCTGAGAAAACTTAGGCTC
AGAGAAGATCAGTAACTTATCTAAAACACACACATACACACACAGACATATCTATGCCCATTATTCTTAACCTAGTT
TCTCTATTCAGGAGTTATCTCTGCTGTCTCTGCTTCTGATTATAATCTGTGTAAGCTGATCCAAGTGACACGATTAC
AGGGAAATTGTAAGCCCTTTGAGAGCAGAGACTACCTATTGATATCTACATTTTAAAATTTGATTTTAGCCAACCTG
TTTATATGCAATGACTAACAGGTTAGTTTGACTTGCAATAAATATTCCAAATCCTAGACTAAGTAAATTTATTAATG
TAATGATTTAACTTGATTTTTTCATTGGCATGTTTCCCTGAAGTCGTCATGCAAAATTGAAAAAAAAAAAAGTATAG
TGTGTGATTCTAGATTGAAATTCAGGAATCCTCCAGGGTTACCTTGTTTGCTTTCCAAATAGTTCAGATTGCTTAGT
CTGACCAACAAGGTCCCTGACACTTGGAACTCTGTCTATCCCTCTAATTGACTTTGTCCCTGATGACCTCGCCCAGA
GATACTCTTCACCCCAGCTATACTGTGTTGCTAGAGTTTCTCTGATATCCCATGCTATTGTTTCCTTTGTTCTCTTC
ATAAGGTACCATTTCCCACCCGCCAACTCCTGTTTTCCTGATGGACTTTTGTTTCACCTTACAAGATCATTGCTAAT
GTATTTATTTTGAGAATAAAAAGTGTAGGAAAGGTCACGGGACAAAGCTGTACACCAGACCTTTCCCAGACGAACCT
AGTGTATAATCTCCCTAGTCCAACATCATGGCTTAAGGCAGTCGATAGATCCGTCTTAATGTCCCTTTTGAGTTTTC
TACTATTATTATATGAGGATTTATTTTTGTCTGAATTCCTCCCTAGATTTGCCCTAGAGAGCAATGACTATTTACAG
TTTATTCCTCTTTGTATCTCTTATGTTAAGGCCAGACCTTGGCACATATTCTAGCTGATTAGAAGACGTTTGTTGAA
TGACCAAGTGATTGAACAAATGACCATGTGCTCTGCCACAGTCCGGTCAGTTCTACTTTGGTTTGGTTATGTGTTTG
CCACATTAAAGTTGTAGCCTGGGAAGTTCAGTTGTGAGATGTCTGCAGAACATGAAAAATTGGAATAATGAGGTTAT
TTCTAAAATTGCTATAATTTAAAATAAATAGTGGTTTATTCCATATATGAATATACACTGGAAACAAAGAATTTCTA
GAATACTGGAGATTCAATGATAACATCATTGAAATTAAATAAATAATAGGATTATGCTAGTTACTTTCTAATTTACT
AGAAATTGACCGTGTGCATGGCACGTATAATGAGTATCATGGGATAGTTACAAAAAGTGGTGCTTAGTGAGTTTCTG
TGGAAAATCTCGGTACCAATAAAACGGAGGATTTCCAGAAATCGATATTCCTCAAAGCTTGACAGTATTTATGCACG
GTTACACTTTGTGTGTCTTTCGTTTGAATCAATGGAAGGAGGCTATAACTGAAAATTATTGTTTTAGTGTATTATAT
CTTTAATAATAAGAGTTTTAAGAATCTATCATTAGAAATAATTATTCCTCAATTTGTAATTCTCAACATTTGAACAA
ATAAATGCTCTGTGTCTATCAGTTAATCTTGCCCATGAAGATTTAATAAAGCACGCTAGTTTTTACAAATGTGATTT
TAGAGATGGTCATTACTTGGTAAAATATTTTGTGTTAACACTTCCATGAATATGTTCTGTGGGAATATACTGCCTCC
ACATTGCTTGCTCATGAAGACATGATTTTTCACATCATCCTATCAGTATTTTGAGAAAGAGATTGATCCCATATTCT
ATGAGCATTTGAACATTCTCTAGTATTTTTGTTTAATCATTAAAACAACCCTTGAAGTCTATGTGCTACACTGGTTA
TTTCCCTCTTGACTTTCCTTTACAGATAACCCTCTATCATAAACAACCTATCTATATTTGTTGTCTCCACATCATGT
TGCCAGCCCTGCTTTAACACACTGCACATTGACTTCTAGCAGCAAAGGCTCATGGGAGGTACTCTCATCAAGGACAC
TGATGGTCCTCATGTTGCTAAATTTGGTGGGTCCTCTACAGTCTTTATCCTAGTTCACCTTATTATGGACCACTGTC
AACTCTGTTCTGCTTAAAACACTCTGTTCCTTGCTTATATGACTCTACACTCTTAACTCCTTTGTGAATTCCTCATC
TGCCCTTCCATTAAGTATTGACGACATCCTTCATAGTTTTGATCTAGGACCTCTTTTCCTCTTACTTGACATTATGT
GGGTAATCTTGTCTTTGAACGCAATTACCATTCTTATGTTGATGACCCTTAAGCTATAATTCCAGCCCAAATCATTT
TTCTGAGGAAGCTACAAGAATACACAAATGTCTAATAGATCTCTATTTAGATGTCCCTCAGGTGCTTCAAGCTTAAA
ATACTCACCTGAGCTCATCACCTCATCTATAAATTCTGCTTCTCCTCCCTGGCTCCCTGATTTATTTAATATGACCA
CCATCCACTTAGTTGAATAAAGCAGAAGCCTGGACACCATCTATACCTCCAATTAATCACTAAGTTTTGTTGTTAAA
TACGTTCTTACATTTTCTCTCTAGAATGTCTTATTTTCCCCATCTTTACACCCAAAACCAAAAGTCAGATGACCCTG
ATCTCCTGCTTAGATTTCAAAACACTATCTCTTGCCTAGACTCTGGAATTTCAGTCTTGCTCCTCTCCAATCTATTT
CTACACCCTAGACTCTGGAATTTCAGTCTTGCTCCTCTCCAATCTATTTCTACACAAAAGCTAGAGTAATTTTTTAA
AAAACAAAAATCTGAATGTGTTCATTTTCTGCCTAAAAGCCTTCAGTAATTCTTATTTGTTCTTCCAGGGATAGAGT
AACAACTTTCAGACCTAGTTTATTAGCTAGTTCTTTAACCACAAAGGACTCTCTCACTTGTCTACTCCCCCTAACAC
ACTTCGCCCTAACCTTTGCCATTCCTCCCTTTCCCTTTTCCTTCCCAGATGGACTTAAGTCCTTTCAGATTCTTAAA
TGTTTCTTCCTCCAGTCTCTTACATCTCTTTTCCTTGTAACTCTAAAAACTACTTAGCTTACGCAAGGAAAAAGGTC
TGTACAATTCCCGGAATCAGCGATCCTAACGTTCCCTGTTGTTTTTTTCGTTGGGACATGAATTCATTCACAGTGGC
TCTAAACATCACCACCCCTGCCTATCTCTCCCATTCCTACTTTATCTGAGCTTATCCATACTCTTGAAGACTTACAT
ATTTTTTTTCTACCAGGAAATCATTACTAGCCTTATTATCCCACTGTCCAAACCAATAAGTCTGATTAGGTATCTGT
ATATATTTAATATTACTATATGTGTTTTTCTAACACTCTAGTAGAGGAGAAGGTGTATTTCTTTCTGTTTTTTAGAA
GCCTGTATTTCTGCTATTATAGCTCTTAAGGAACTCTCATGCAATTGCCTACTAGAATGTAAGTTACGGTAGGATAA
GAACTGGATCAGTCATATCACACATCCACATATAGGACCTAGCACCATATCTAACACACAGCAGGTACTCAATACAT
TTCTTTCCCAAATAACTAAAGAGTTTAAACAAACCAAAATGATTAAATGAGAAGTAACTGTTTTGGTAATTCTTGTG
TCCTTACTAGAGTCTAAATTGAGTGATTTTTATATCATCAGTTTATACTCCCCTTTCCCAACCCCAATTCTTTCTTT
TTTAAATTTTTTAAATCAAATATGCCTTAAAACTTCAGGATCAGTTGAGTAAAATGATGCTTTTGTCGTCTTTTGCA
AAATAATTGTATTTCAGAATTTTGATTTAGATATTATAAACACACCTAAAATAATAGCTTTAGTCTTAAGATGAAGT
GCTTCTTAAACTCCCTAAGATGGGTTGGACTATGGATATGAACATGGACAATATCACATTAATTTGTGTACACAGTT
CTAACACAGGGTCTGGCATATAAGAACAAGTCAGTAAATAGTTGTTGAATGGAATTGAAAATTTAAGTAGCAAATAA
AGTATTTTGACCTACAAAGCAAGAAATCACATTTTTCTTTTTGTCACAGTTCCTTAGGAAGATAATTAATTTTTTAG
TATTTAAGGATGTTAAATATTTATTTTATGTTCTATTTACTAGGCTTCTTTTTATGAAAATTAATTGGTGAAAATAG
CGTACATATCTTCCTTTACCAGAACATTTACATTTTGGGCAGTAACGCTGGCTTTTGTTAAAAAAGCAAAATATGTG
TGAAATTTATGTTTGAGTTGATTTCAATGCATTACATTTCCATTTTAAATCTTCTTTGAAATACTCTATTTTTGACA
CCATGAAACTGTATTAGATCTTAGTATGTTAGCAATGTTTTGCAGTTTTAGAGCCATAATTATTTTAATGACCACTT
TCAGCATATACGTTTTCTACAGGAAAAATAATCTCAAGAACATGAAAAGTGAAATCTATATTTTGGGTTTCAAAATG
ATACATTTTAGCTAAAATATCATAGTTTTAATTTCTCAGTGAAAAATATAGTGTGGTAATTTATGAAGAGACTCAGT
GTTTAAAAATTATGACTCTATAGTCAAGTTTATGTTTATAGGACATAGGTTATTCAATTACATTTAAAATAATTAAT
TTAGAAAATGTGATCAATGTAACAAATTTTACCTGTTCTTTTCTAAAGCTAAATTTGTTGTTTGAAGTGTTTCTTCT
AAAATGCTAATGAACTATCAATTTAATTGTTGAGCTTAGAGTTAGAAACTTAATTATATTGCCAGAAATAAAGAAAC
AAATGGATCCCAAAAGATTCACACATTAGAAATGTATGCCAGGGAAATGCTTTTGAATGTGTTCAAGTCATGGCTTC
TAACTCGTAACTTATAACTTGTGTTATGTCTGGCTTCATTCCCTTAAGAAAAAGGAATAATAATGCCTTCGGAGAGC
ATCCCAGCTGTAAGAGCTATGCATTGGTGTCTAAAAAAGCTTCTCACTCCTCATACCATCCTGGTCTGGGAATTTAA
AAAATTGTCATCTTTTGATAATCTGTATCACATAGTCTTCTGCATAGTCATATGAGGTTAGAACTGCCCCATAACTT
TTGCAGGGCCTATAGTAAGTGTGCAAATGGTTGCCTGCATGCCACATATTTAATATTTATAAGGTATAAAGTCAACA
GACTATTAAATATATCCTATCTGCTTTCCTTGACAATTATACAATCATAATGATATGGACATCTAGATTCGATTTAG
AATTCTCTCTCTCTCATTTTCTTTTTCTTCTTTCTTTCTTTCTCTTTCTTTCTTTCCTTCCTTTCTTTCTTTCTTTC
TTCTTTCTTTCTTTCTTTCTTTCTTTCTTTCTTTCTTTCTTTCTTTCTTTCTGTCTGTCTGTCTGTCTTGTTTTTTT
AAATAGTGCAAGCAGTTTATTCCCTGGCAAGGAATTTGGAAAAAACTCAAATAGCAAACCACTTGATACAATAAAAT
AAATTCCTTAGAGTTTTGTACTGGAATGAGGCAGCTTGGTTAGAGCTAACCCTAAGCCTGTTATTTAGGATACATTG
GCTTTTCTTAAGCTTAAAAAAAATTTTACTGTGTTAATGACATTTAACATGAGATCTATCATCTTAATAAATACTAC
ATGCACAATACATTATTATTGACTCTAGGTAGAATGTTGGACAGCAGATCTCTAGAGCTAATTCATCCTACTTAACT
GAAATGTAATGTCTGTTGATTAGTAACTTCCTATTTCGCCCTATCCCCAGCCCCTGGCAACCACCAGTCCAGTCTTT
GATTTTATGAGTTTGACTGTTTTAGATACCTTATTTCAAGTAAGTGGAATCATGCAGTATTTGTCTGTGTCTGTCTT
GTTTCACTTAGCGTAATCTTAAGGTCCATCCATATTGTTTCATATTGCAGAATTTCCTTTTATAAAGGCTGAATAGT
ATTCCATTGTGTATATATACCACATTTATCTATTCATCTGCCAATGGGCATTTAGGTTGTTTCTGCATCTTAGCTAT
TGTGAATCTGTTGCCTTTTTTCCCTACCTCCTTTACTCCATCCTGCACTGTGAGGAACTCTGTGCACATAGATCTGG
TCGCCCCATTTCCCACCCACATGTTCAAGTTTTTCCCACTCACCTCATGCAAAGATTTACCCCTTAGCCATACCCAG
TAACTGACTTTGAAACATTTGCCCAGGGAGTTGAGGGATTCTGAATGCCAGATCATGGGAGCGGGGCTTCTAGTGAG
CATGTTGGCTTGGTCCTACAGACTCCTAATCAGAGCTTTGCCTTTGAAAGCATGGGGCCCAAGGGCAAGGACCCTAC
TTGTTAAGGTCTAAATTTTTTTTCTGAAATAACCACATCGAGCTTTTATGTGTAGATGGCCTAAATTGGGCTAACCC
AGAGGCAGTGACACTCAAGTAGTTTACATCTAAGCGCTTTCCATGTGCTTCTTTTCCCATTTCTGTTACTTCTTACA
AAATAAAAAATCAGCATCTCAATTACCCTGATTTGATCATTGAGCAATCTAAAAAGTATCAAAATATCACATGTAGC
CCCCATATACATACAACTGTTATATATCACTATAAATAAATATATACACATTATATTTAAAAATCAATACTTTAATT
TTACATGTTTAACAAATCACTAGCATATACATTCCAGATTGAACTTACGAGGGATGTGGAAAAGATTCAGTGACTAA
ATAACAATAAAGTACTCTAAAAATGAAAATGTGAAATGGAGACAGTATAAATCTAAAATCATATCACTTATGAAGTA
TTGTTTCAAATAAACAATAAAATATATCTTCAATCAATTTAATTTTATTTTAGTTGTATAAAATCTTTCGGTCAGCA
TTAACCTAATTGGAACACTAAATAGGTACATCTAAAAAATATAATCCCCCCCAAAAATATGTAGCTCATAAGAGATA
ATGCATTGAACACAGATAATATTGGCGTTAAAAACAGAACTCTACCACATTTGCAACGAAATGTTTATCTGTTCTTC
CTACTAGAAAATAATAAAATAGTTCTGCATGAGCTTGAACTCGAAGTATTAGGTGTACAAAGACCTTTTAGTGAATG
AATGCTAGCTGAAAAGCAAATTTTAAATATGAAAAATTAGCAAGACAAACATTTGAATTTGTGGGAGATGAGTAAAA
CTCCTATAAAAATGAATTGTTTAGTGTTAAACAGATTGTGTATGAAATATTAATGGCATATTGTCCTGAGCTCCCCT
TCCGCTGTTTCCATGTAGATGACTGAATTTCAAACAGAAATATGCCAGGAATGATTACGTGAATGAATATTACTACA
TGAGATTGCTTAAAGAGTATTTCTTCTTTTGCCTTCTTTTTACTTTCGTTATTTCATTTAGTAGTTAGAAAATACTG
TCTACAAATATGTGAGAACTGCTTAATTTATTTTTGAGACATTAATTAATTCAACTAAACTATATTGACTGTGTGAG
AGAGATTCCCTTGGTGAATATGTGGATTTTTGCGGTGGTAAGAACTCTCCTCTGGAGCGCAAATGGTATTGCTCTAG
GAATAAAGCATATACCTCAGGCCCAGATGAACCAGTGCAATCTACAGTAACAGGTTCAAAGATGACCTCATGACCTA
CTGTGGACTAATAAAAATCAAGGAGACCTACTGCAAAGGTTTCTGGGAAATTCTTTTTCTCTTGCGTTGAACTAAGT
AATATACATATGTGATAGTTAGAGCTGCAGCCTTTGTAATACCATGACAGAAGATAACCTGAAATAAGGCTGACAGA
CACAAGAGGGAGACCTAAGAGTACTGAGAGATATGGAGCAGGACCCCCTGATTGAACTTCACTTGCAGCCCCCTTCT
GCAGTTTTCAATGACGTGAACCAGTAGAATCCCTTTGTTTACTGTTTTTGATTAATTTGAGTGCAGCTTTATGTTAT
GAGCAACTAATAGCATCCTCACTGTCACAACTGCCCTCTATACGGCAGGCACTTTGTGATACTAAAGAAAGCAGTAT
ACAGAGTAGAGCCCAGTGAATAACAGGGCAGATGTTGCAATTAAACTGCCTGTTTAAATTCTAGCTCTTCCACTAGC
TAACTTGTGACTATCTAAGTAATTTAACCTTCCTATAATCATACCTATCTTGAAGACTTGTTGTAAGATTTAAAGCA
CAACAGTGCTACTATAAAACAGGTATACAGTAAAGCTTAGCTACTTTTTTATTAGGCCATATGATATCATTTCATTA
AAATCTTATAGCCATGCTATAAGGTATTATGATCCTCAATTTATAAATAAGACAGCTCAAGTTTTGGTCAAGTGACT
TTACCAAGGTCATAGAGCTAGAAAATAATGATTCCAAGTTACAAGCCAAACCTCTTCAATGCCAAATTTACATCATC
CCCCATTACTTGAAGTGTAAGATTCACATGGACAGAAATTTTTGACTGTTTGATCACTGCTATCTCCTTATCATCTA
AAACAGTCTCTGGTCCATATTAGGTGTTCAATAAATATTTGTAGAGTACATAATTTCCTTCACAGACTCCACAATCT
GGTGAAGGAGGCAGACATGTAAGAGAATTATTTCAGGATTCCACAGTTGATGCTGTAACAGAGCTAAATATAATGAA
TGGAGGAGGAATGAATAAGTTTGTCTGGGAGCAATGCTATGGCTATTGAAATAAGTCTTGCTCATGCTTTGATTGAA
ATGGTGGATATAGATCACACAACAAATAACAATTAGATAACAGCTTGTTGGGAGAAAGCGAGGATCAGTGTTTGCCA
TAAACATTTCTCATAGCTAATGTCAGGTGTTTGATTTCTCAACATTTTATATCTTTGACTTTGATTTTCTCTGTTTT
TATTTTTTAACTCCATTCTCAAGAAGTCTGCACATAAGAGTTTCAACATCTAGCACTTCATAACTCCGTCATCTCCT
CTCAGGCTTAGAGCAAATTCTGAGACGTGGATTTATCGTCGAGTGATTTCTTCCTGGCATTTTATCTCTGAGACCAG
GATCTGGTTGCTAAGCATGTAGACATAGAAATGCATTTCTTCATTGAACCCCATAGGTTCAAACTAGTGGATAATGA
GCACAATGTCAATGTGATTATTTGTAATGGGGGAAAGGTTACCGGAGAATATTACACGACCATCCACATAGACTAAC
ATTTTCCTCATGACTAAGTTTACTTAGCAAAACAAATTAAAAACAGAAGTTTGTTTAGCAGCACAGAATTGAAGGAA
GACAACCAGATGGTTATGAGGAAGATTCATCCAAACTATGCCAGAACTGAAAGAAATTAAGTTCATTCAGTACAAGA
ATTGTCTAGAATAAGAGAATCCATTTTGTGTCAGCACTTCCCAAGTTCTTGTTAATGCTACCTTAAGTTCAATTCAA
ACCAGGCAGCATTTATTACGTGTTGTGCTGGGTCCTAGGAGGACCGCGTTTTAAGAACTTACTGTGATCTTCTAGAT
CAAGTTTTTATTTCAATATTTCTACCTCATTTCTGATTCTTAGGTGTTCCTTATTTCCCAATTTATCCCCTGCAGAA
ATTGAGGCAATAAGATGTCTATCTTATTGCCTATGGTGTTGATTATTTATGTTATATTCTGTTTTGTGAAGTTTGAC
CTCTACCTAATTAAATTACATTTTCAATTGTATCTTGGATTGATTTATTCAATAAGTATTCTTTAATATTTTTGCAT
GAGGTCGGTCAGGTTTCATCAGACATTAGGAATTAATTATAAAAATCTCTAGATTGGTACTTGGAGCTTAAAGGAAT
AAGGTGGTGGAACGTTAAATGAGGAGGAAAGAACCAGCAGAGCTGGGATAAAATTCATCTCTATCATCTTCCCACCT
GCTTGATCTCTGGCATATAATTTACTATCCGTGAACCTCAGGTTTCTCTTCAGAAAAGCTGCAGGGTTGTTGGGGGA
AATAAGGCAATTCCTGGGCTTCAGTATGTTCAAAACAGAGCATTAATATTATTATAGACTTTTGATGATTTACACAA
TTTTAGCTTTTTGGCAAGACATATTTACTAGTACTAAGTAAAAGCACGTTGACTTTCTAAAATGAAAATGTGTATGT
GAGGATGAAGAAAAAGAAAGTGTTTTGTTTGATAATATAGCATTATAACACTGCACAAAAAAAAAATGGTATATGCA
GAGACTTCCATCACTTGCTTATGATGCCGCATTGGGATCTCATTAATAAGACACTTCCTCAGACACTTCCTTTGTGT
TCAATAAATTTCAATTTCCTCCTTTCCTTCAGTTCACTTCAAGAAGGACGGCAGCAACTTTCTTGTTGCCAAACCTG
ACAAATGTTTTTTAGTGCTGATTATACTCGAGCATTCTGTAGCAAAATGCTGTGGGTGAAAATGCCTTCCTTCTTAA
GGGAATTTAGCTTCTGTAGTACCAGAATCTCCTTGTTGAATGAACATGTACTGCCTAAGTCTTAGTAATCCCTCCTT
TTTGAGCCCATTTTCTGGCATCTCTCCCTTTAATATTCCTCAAAAAGTTGGATTTTTCCTGGACTTTTCATATTACA
GACTTTCCTTTGGTCATCCTCATCCATTCCGTGATTCCAACTACATTTTCCCTCCATCCTGGCATCTTCTTTCTTCC
AGACTTGTATATGCAACTGCTTCCATTCATACACTTGACCAACCTTTTAATTTCTATAAGATCAAAAACTCAGCTCA
CAAGCTTTCCCCTACCATCGAGCGGGGTTCTTCTTTTGCTTCTTTGTTTCAGACAATGGCACCACCATACTCGAGTA
AGGCACGTTCATTTATCAGGTCCTACCAAATCTACAATAAACTCTCTTGAATTTATCCACTTGTTTTCATTTGAACA
GTCATTTCTTTACCTGGGTAGCCTGCACCTTCTACCTGCATTGATTCAGCAGTCTCTTCACCACTGGCTCTCCCTCC
CTCTCCTGCCTCTCTTCTTGCTCCTTCAATTTATTCTCTACTCTTCATAGTGACTTTTATTAATGCAAATATGACCT
TATAACTCCCTTGCTTAAAGACCCACTCATGTTTGTCTTTGTATCCATAACTTCCGGCCTAGGGCTTAACGCATAGC
AGGTGCTCAGTAAATCTGTGGTAGATGAAAGAACAAGTTGTATAAATACTGAATGGTCTGATGTGCTCTTTGTTGTG
TCAAGAAGGACATTTTGCAGTCAGGATAGCTACATCAGTCCTTTAGTAGGCATTTGACAGCACTCGCATTATTCCTC
AAGAGAAGATGGATGTATTGATTCTGTATTTCAAATGACATAACTTTTGTGAAATAAGAGGCTGCCACGGTAATCTG
AGGGATCTCTCAAGTTCAAGGGACTCCACAGTGCTTTGTGTAAGGTAACAGGCTAAAGGGTTCAGTCTTAAACTTTC
TTAAGACTGTAGTTCAGGGTTCCTATGGTGGGGCTATAACCCTGAATTACATCCTCTTTCATTTCATGCTGATAATG
AGAACTACAAACCAAGGGGTATTAGGAAAGAATCCAGGTTTGATGCAGGGAAAAATAAAAACAACTGATAATCTCTA
GTGTCCCCAACTTCAAGAATTCCTTTCTTCTTTACACCAAGCTTTTTTTCTCTGCCAGGACTTACTTTGTCTTCTAC
ATGTTTAAGGGAGAAAAATGAGTTAACAGAAGGGGAGGTACAGCATTTCTATTTACTTAGATGCTAGAGAACAGGAT
GAAAGGTATGAAAAATATGAAAGTCTCTCTCTCTCTCTCTCCCCAGCCTTCCCCCGCTTCTCTCTCTCTCTCTCTCT
CTCTGTGTGTGTGTGTGTGTGTGCACGTGCGTGTGTGTGTGTGTCATAATACTCAACCTTTCTTTTCTTTCAAGCAT
ATGTTGTGGCAGAGACAAGTGTACATCAAAATTCGTGGTCCCTCTTTCATAGTATAGAGTTCTTGCTAGGATCCAGC
TGCAAGCCAGCAACTACATTTCCCAGCCCCACTGGCATCTAGTTAGAGCCATGTGACTAGTTGTGACCAATTGAATG
TGAGTGGGAGTTATGTTGCAGGCATACCTTTTCCATCTTCTTACTTCCCATTTGCTAACCTTATGGAAAAGAGTCCC
AAAGACCTAGGAGATGAAAAAGCCTAAAATGGAAGGACTCAGAGTCCCTGAATTACTGGGTAGAGAAAAGCTGTTTG
CAGATGGGAATGCCCATTTTGTAGTATTCTTTCTTTTCTTAAGCCACTAAAATTGTGGGATCTCTTTGTTATAGCTA
CTGGCATTAACCTCTTACGTATACATACAGCTATGTGCTACAAAGAGGAATAGATACATTTTTTAATCGTTGAAAGG
GGAGAAAGAAACATATTTAGGAGGAAAATAATTTAGTCTCTACAATTGAAAAGTGTTTTATGAATAATATTTTGTTT
TGGCAGCATATTAAATCTCAGGCAGCTGAACTACATTAATTTTCAATTCTCTATATATGTTTTTGTCTTCAGGGTTT
AGTAACACTGATATATAACAGTTTCTTTCTTTTAATTTCCAAATTTAAATGTCTAAGTTTGCCTTCTAGGCAGAAAT
TAAGTCCCATTGTGGAATGAGATTGGATCAACACTTCACCAAGATCATTTTAGTTCTTTGTAATCTTAAATGAAATA
AGCTAATAAAGCATTAAATTAGCATGTTGTAAAACTTCGTGAAGTTTTAATATGCTTCTAAGTGGCAGCTCTTAGCT
TATTATCTCTAAAGCTAAAGTCAAAATAAATGTCTCAGTTGATGAAATGGAGATGAGGCAACATTTTATCAAATTTA
ACAAAATATTTTATATCTGAATTATAAAGTCCAGATTATCTAGTAATTATCATATAAATGTATTTAACCAGACATGC
ATTTTTCTCTAATCAGTAGCCCTGGAGTCTTTGGACCACAAATGTGCCTTATCTCAAATGCTTTAACTGTGACATTT
TGCTTTAGACTAGCTCGACTACTTCTACAGAAATTATACACTTCATTCACATTCATCCAGATGAAAAAAATACATGT
AGAAATGATCATAATAAGTAACATTTGTTTAGGATTTCAGAGTTTACGAAGGGTTTTTCTATTCACTTTCTCACTTG
TTCTTCATGTAAACTGGTTTGGTGGACAACTGTCATTATCCCTGTTACCTGGAGCCCCTGGGTCTTAGGGAGACTTC
TTGACTTCTCAAGGTCATGAAGGTGCTAACTCTGACCGTGTTTTTATTCCTACTGTGCCACACTTCTCAGGTAAAAA
TCATATTGCAGACACTTTAAGAGAAGTACTTAAGAAAATAAATTCCTCCAGAGAATTACATTTAAGTTGTTTCATTA
ACTGCAGTGCATAAAGAAAGGAAAAGTGTTCCCAAACCCATGTAGTATTTTGCTATTGCTTATGGTAATATTCTGCA
CACCTAATATTGTCAGCATAATTTTCCATGTAACAAAATGTCCTAAATCAGCAATGTCCAATATAACTTTGTGTGAT
GATAAAAATGTTCTGTCTCTGTGCTGTCCAATACAACAGCCACTAGATACACATGACTACTGAGCAATGGTAATATG
GCCAGGGACACTAAGGAACTAAATTTTTATTTAATATTAAATAACGTTTAAATTTCAAAAGCCGCATGCGGCTAGTG
GTTGTCATCAGATACTGCAGTTATAGAAAATTAGAATTTACCTCTTTAAATACTAAACCTATTTTTAATAGTAGGAT
TTTTAAATTAAAATAGTTCTAAGTGCTTTTAAGTGATACGAAGTCAAATGCAAGATTTCTGTTTTAATAGTACTCTC
AACCCAGAGACAATCTTCATGCATCCTTATACATGTTCTTTGTTGCCTTATTCTAGTTTTATTTTAACATTAAATGC
CTCTGTTCTACTTGATATTGACTTGCTTCAGAGAACACCAAGTATAGTGGAAAGAAACACACACATGAGGACTTGAG
GCTACCAACCAGGTTCAACTAAATGCACTCTGATTTAATTGTAGTATTGGGATCCCCTGTTGCATTTATTGAAGAAG
AAAAAAACTTTGCAACCAAAAAGATATTTGAAAGCAACTGTTCTTCTTGGACACATGATCCCTCATAAAGTGGGGCT
TCCTGCTTTTCAGAGACTTAATTTCTGTTCATATTCATTTCAGCAATAGTAATAATGATGATGGCGATGATGATAAT
AATCATGATGATGCCTAAGTGTTGTAGTAATGCTTCTTCTGAGCCAGACGTTAGTCAAATTACTTTCTCTACATTAA
TTCAGGCAATCATCACAACAATCCCACAGGACAGGTTTTATTATTATACTTATTTAGCTAGCAAATGATATAACTAG
GTTAAGTTACTTGCCCAAGGTCATACTGCCAAGACAGTGGCTCTAGTGTCCCTGCTTCTGACCATATGTTATGCTGC
CTATCCTAGAGCTTTTCTCTTCTAAAATAGTAAAATAATATATTCTTTGTTTGTTTCATACTTTTTTTTTTTTTTTT
TTTTTTGAGAGGGAGTTTCGCTCTTTCGCCCAGGCTGGAGTGAGGTGGCGCAATCTCAGCTGACTGTAACCTCTGCC
CCCACCAGGTTCGAGTGATTCCCCTGCCTCAGCCTCCGAAGTACCTGGGATAATAGGTGCCCACCACCATGCCTGGC
TAATTTTTGTGTTTTCAGTAGAGACAGGGCTTCACCATGTTGACCAGGCTGGTCTCGAGTTCCTCAGCTCTGGCAGT
CCGCCCGCCTTGGCCTCCCACAGTGCTGGGATTACATGCATGAGCCACTACACCCGGCCCATACATAAATATTTTAA
GCGAAGTACACATGCATGATCATCATACTTTTAATAATTTCATTTAACTGTTTCCAAAGAATGTTAGTATGAGGTTT
TCTTTTTTTCTTTTTATAATTTCAACTTTTATTTTAGATTCAGCGGGTACATGTTCCCTGGATATAGTGCATGATGA
TGAGGTTTGCTATATGAATGATCCCACCACCCAGGTAGCGAGCATGGTAACCACTAGTTCTTCAACCCTTGCCTGTT
CCCTTCCTCCCTCCTTCCTCTGTAGTCCCCAGTGTCTATTGTTCCTGTCTTTATGTCCATGTGCACTCAATGTTTAG
CTCCCACTTTTAAGCGAGAACATGCAGTACTCGTTGTCTGTTCCTGCGTTAACGTGCTTAGGATAGTGGCCTCCAAT
TGCATCCATGTTGTTGCACAGGCCATGATTTTGTTAGTTTTTATGGCTGTGTAGTATTCCATGGTGTATACGCGCCA
CATTCTTTATCCTGTCCACCATTAATGGGCACCTAGGTTGATTGCATGTCTTTGCCATTGTGAATAGTGCTGTGATG
TTATATGTACTTTTTGGTATATTCAAAGAGAAATGCTATTTTCCTCTTGACATATTTATGTCAATTTAACATATTTA
TGTCCCTTTTCTTTTTAGGAGCACCATTCTCTTCCTTTAACATTATAAATAAAATATTTTTTGCTTTTCTGTTTTTG
TAAGTGCAGTTTTATTGACAGAGTGAGACATACACGTCGATATTGTGACTAGCTGCATGTCTTCTATTATTTAGAGG
TCTCACTCAAATGTAGATTATCAAATTCTGTTAGTGAAGAGGGTAGAACAGCAGAACTAATGCTGGTTTCCTTCTCT
AGCATTATTTGATGATAAACTAAGATGATAATACCCCCCAGGTCTTAGATACCTGCAGTAGGACAGGCACCCTACAT
TTAATGCTCCTAGGAATCCTTCAAAGTGATAGCATAGTTATTATACAGTAATTGAGAAAACTGATGTTCATAAGTTA
GAAATTTTTCCGAAGTTGCAAAGAAAGTGAATGGAAGAATTATACCAAGTTCTGGCCGGGCGCAGTAGCTCATGCCT
GTAATCTCAGCGCTTCAGGAGGCCGAGGCGGGCGGATCATGAGGTCAAGAGATTGAGACCATCCTGGCCAACATGGT
GAGACCCCGTCTTTACTAAAAATAGTAAAATTAGCTGGGCGTGGTGGCACGCACCTGTAATCTCAGCTACTCGGGAG
GCTGAGGTAGGAGAATCACTTGAACCCGGGAGGCGGAGTTTGCAGTGAGCCGAGATCGTGCCATTGCACTCCAGCCT
GGGCGACAAGAGCAAAACTCCGTCTCAGAAGAAAAAAAAAAAAAAAAAAAGAGGATTATACCGAGTTCTCTTTGATT
CCAAGCCCAAACAAATCCTTTTTTGCAATATATGACATTGTTTCCCTGTTTGCATTCCCCATTCTGTGTATCACACA
TCCTGTGGCCTGATCAAAATTCATTTTCAGATTCTGAATTTATTTTCCATTGAATCTATATAAACTATAAAGACAGA
AGATATATGTATGTGTGTATACCCACGTTTCTCTTCCAGTGTCAACTGATAAAAATAGATTTCAAAGTCTCAATAAC
CTTTAATTCCCTTTTTCTCTTAAAAATTCTTTAGAACTTGTACATGACATTCTGACTCTAGCAGATTTTAGAAAACA
GAGAGGCCATTAGATATTCATACCTTACTATTCAGATGAAGTATTCAATGCTAAATTATGTAATTTATCTGCTTTGC
AAATTGTATGGTCAGATTGAGTTCCACAAAGGAGAGATAATTTTTAATATAGGCATTCTGTAGCTTCCCTAATTATT
GAATTAGTTTAGAGCAAAATCCTTAAATTGTATCGTTGCTATGCTCAAATTTTGTATACTTGTCCACGTAGGCTATA
TTAAGATTTCATTGAATTTTGGTTTCTTTCTCAGTGATAATTCAATATATCAACTCACCACTCAGATTTGCCTTTGG
GAAAATCCAGGCCCCTTTTCTGGATTTTTAGAGCAGATTTTAAAAAAGTGATTCTGTATATGTGTTGAAATTAACCA
CATCTCATTGCTTTTGAATGATTGAGGTAATGTATACCTACTACTTTAAAAAAAATGACTTACTTAGAAGGTGTCCA
TAGTTTTATAAGTTCCATTGAACTGGTTTATATTGTATTTAGAAAGGAAAACTACTCCTTTTATCCTTAAGGGTGAA
AACCTGGATTTTATTATACAATTAACACATATTTATTTTTTATTATGAAATATATCACAATATAAACGTTTACAGGG
AGTGTTTAAAGTGGTGTTGTCCAATGGAAATATAATGTGAGTCAAATACGTAGTTTTCAATTTTCTACTAGCCATAT
TAGAAAAAGAAACAGAGAAATTAATGTAATAGGATACTTTATTTAGCCTAGTATATCCAAATCACAATTATTTAAAT
ATGTAATCAATATAAAAATTACTAATTATGTATTTAACCTTTTTCTTTAGTAAGTCTCTGAAATCTAGTGTATATTT
TACATTTATGGCACATTGCAATTTGCATTAGTCACATTTGAATTGTTCAATAGCCACAGGTGGCTAATGGCTACCGT
GTTGGACAGCACAGGTTTAAAGAATAATATGAACATCTGTGTTCCAACATTCTGAGTTTCAAATAAGAAGAACACCA
TCAGTATTTTGGGAGAAGCTCCCTATGTTACCCCTTGCTAATCACCTTCCTTCCCCCCAGAGCCAAAAGTAACCATT
ATCTTGAATTTCTAGTAAACAATGCTCATTTTTTAAAAAACGTATGTTCAACACCTGTATTTGTATCTTTAAAGAGT
AGCTAGTTTTAGTTTGCCTGGATTTGAACTTTATATTAAGGGAACCACCCCATCTCTAATCTTCTCTGTGAATTCTT
TTCTCTCAATACTATGTTTTACATATTTACGTTCATCAATGTGCAACTCATTGTATGTATATAACACAATGTATATA
TTTTACATGCGTATGGACATTTGGGTTGTTTTTATGTTTTTGTTCATCACAAACCACAACACACATGTGTTCTTGTA
TATGTTTTATAGTGCATGTTTAAAAATTTCTCAACAGTATTCGCTAGTAGTATTGTCAGGTCATAGGGTATGCACAC
ATAAATAGAAATGATTGATTAGCTGCAATTTGTAGTGCACACATATTTGCTATGTAAGTGATCCATGTTTAAGACTT
TAACTGAATTTAAAAAATATTTTATTGGAGCCAATCTAAATGAGCTAAGGGTTTGTATTGTTTACATAAGCAAAGAT
TACACTTACTGGGTCAATTCGGTTGATTAACTTTGGATATATAAAATATATAGCTAGTTGTTAAATAGATATAATTA
TTAATTGGCATTACTTTTGTTTGTATATAAAAATTTCAAAATATCCATGACTTAAGCAAGGTAAACACCCACTGGGT
GGCTTAAGCAACAGAAATGTATTTCTTGCAGTTCCGGAAGTTGAACGTCTAAGATTAAGGTGATGACAGGGTTGGTT
TCTGGTGAGTCCTCCCCCATTGGCTTGCAGATAGCCGCCTTCTCCTTCATGACCTTTCCTCTGTGTATGTGCATCCC
TTGTAGCTGTTCTTCCTTTTATGAGGACATTAGACTTATTGGATTAAGGTCCTACCCATATGAACTCATTTAACCTT
AATTACCCCTTTAAAGGCCCTACCTCCACTTGCAGGGGTTAAAACTTCAACATATGAATGGGGTTGAGGAGACCTAC
TTCAGTCCATAACAGTTTCTATATTCTGAAGATGGTCTTTAATTAACTAAACAGTTAATGTTACTTTACTGGGAATG
TCTTTTGGATGGGGGAATAAGCTGATGATATGAGAAGGGTTGGTGAATTTCTCATAAGTGTGAAATTTGTTGGGCCG
GCCCAGCATGATTTTCAATCAAATACGCTTTGGGGACAAGTAGGTTGAATCACTACGAGAGGTTTAAAAGAAAGCAA
GTTGTAATTGCAACTTTTAATTGAAAGAAAGACAGGCTTTGTTGATGTGCCAGCAAGACTGATAACTGGCTTTAACG
TAGATAGTAAGGCAGCAGATTCAATCCACTGATCGTGATCTACTAGTGAATTTCAAAGCCTTATGCAATAGAACTAC
AAACCCTTTCCTTGCCCACCTTGCAGGTGGATCCATAGGCAAAATGAACATTTGCAAAAAAGCCGCTATGTTTCAGA
ATTTGTGCTAGGGCTTTAATATCTATAATTTCTCCAAATCCTCACAATTTAAGAATTAATTCAACTTAGCCCCATGA
ATAGGGTGAAAATTCTGAGATTTAACAAACTAAAATAAGTTATCTGAAGACAGACAAATAGAAAGAGTTGAGATATT
CTATTTGAATGTAAAATTTTCAAAAAGTAGAATGACAGCGTCAGGAATTACAGTCTCAGTGTTGAACACAAGACTTA
GGAACAAATTTGCTGCATGTAATTTCATTGAGATGGGACAAAGTACAGCATACGTAAGGAAGTTTTAGAACAAATAA
GATAATTATTTTACGAGCTTTGAAACATGTGTAAGAAAGATACGAATAAAAGTATAATCACATTTGACTAAAACATG
AATACCTTAAAACTGAAAAGCACTGAGATTATCATTATATAATTTTGAATATTTTAAACCACAATGCTTTGGGAGTG
CACTGTAATATTTTAGAATTGGAATTTTAACTTACTGGCTTAAAAAGTAATGTACTTTGTTTTAAATTCAAAGATTA
TCTTGTAAATTCAGTTCGATCTATTGAAAAAATTATAAAATTCGGCAAGAAGCCAAAGAAGAACAATTATGTAGCTC
AAGATAATTAAATTTTCATGTTTGGCTTTAGAAATATATTCGTCGTGACATAGTACATGGTAATCTAGTGAGCCCAG
ACAAGTAGTTTTCTCTTTTTGTCAAAGGGAACAATTTGATGCGTGTTCAAGTTGCTTAAATAAAATTTTGTATGTGC
TTTCTCATCACAAGAGAACAATATGATTTTTGAAATTATTTTTACTTTATAAAAGAAAAAAAAAAGCCCTCACAGAG
AAAAAAGAAAAAAATGATGATGTCTTTGAAAAACAAAGTTAATACAGCTTTACATATATTTGACCTACATCAGGGTT
AATATTTTTCAAGGTGAAACATTAGATGCTGGAACTTGCAAAAACAGGCAATCCTCCTTTAGATGAAACGGACACTC
TAAGGGTTAATTCATTCACTGAGACCTATTGTGAAGTAAGCCCTACAGAGACTGAAAAAGTTAAATGCAACTCACAA
AAGTTGCTAGAAGAGTCATGATGTTAAAATAAAATAAGTACACAATGTATGCTGCAAGTATACTTAGAGCCATGCTA
GGTGCGGTTGAGAAGTTCAATACAGGTCCAAGATAATAGCTGCTTCTCCTATAGAACATGTCTTCTCATTGGAGGGA
TAAGACCTGTGTCTATGAAACAGGCGTAATTACATAGCTCTGGAACTATATATGCCGAAATAAATGAGACAGTAAGT
GTTATTGTACTATAAAGAATGAAGAAATCATGATGAGAAGTAACAGTTAATGAATGTTTTCTAGAAAGAGTAGGATC
TGAATTGGCCTTAGGTTGTAAGCAGAGTTTATAGATAGAGTAGTGGTATGTCAGAGTCACTCTGGGTGCTTAAACAT
ACAAATCCCCAAGTCTCACCCAAATGTGTCTTCAGATGAAAGGAAAAAACAAATGACTTGAGCTCCCCCGCAAAGAA
CACGGGTGGTATATTGAGCAGCCAAGGAGTGACCAGAGTGGCAGGCCCATGTTGAGGGACAAAAGAGGACAATTAGA
ATATGATTAATACAAATTTACAGTGGGATGAGTTGTTAGCCTGAGGAGCTTGAATGTGAACCTCTGTGCAAAAAGGA
GTCATTAAATACTTTTGAAAAAGGTGGGATGGGAAGAAAATGACATTCTCAAGACAATTAGATCGAACAGTATTAAG
CATGCTGACTTATTAAGTTATGCACCTTGAGAGGGTGGAATGAGGGAAAAGGGTCTTTATCTGGAGTAAGACAGGAA
GAAGCTAAGCTGTAATTCTTACTGGACTGTAAATTATGTGCAGATATATTATCTGTCATGTTCGTGGGCGCATTCTC
AGTACATAGCACTTGAAACAGGTACTCGATAAATTGTCAAATGGATGCATGGAGTGATTTCCATGCAAAATCTAATA
TTGTATAGTATTAGAAGGGGGAAAAAAGCATGGCATTATGCTAGCAGAAATGTCATTTGGTATTGAGGATGAAACAT
TTTCAACAGTTTGCAAAGCCATCCACTCAAACATTCTGTCACTTTCCAATAATTTTGAAGGATGTTCTTTCTACTTC
TACCTTATTACACAATGAGTTGAGTAAGATAAAGAAGTCATGTGCAACAAAACAGAGGGAGATTTTCTGAAAGGCAC
TACACCAGGAAGTTGTTGTACTCTTGCTTCATCTTGCCATCTTGGATATACTTCTGGCGCTACCTCCAGGCCAGTTC
CTCGTTACATATGTCATTTACTTCCCACATGCTAGACTCACCGAGTTAATCATTTTGCTGCAGTTAACACATTTTAG
CAGAGTGTAGGTTTATGGGTGAGAAGGAAATCAATGATGTTTCAATACAGGGTTCTTTTCCCATCCCCCTTATTTCC
ACTTAGAACTGTCTCTCAAGTCTTAATTTGCCTCTAAACTTTTTTCCCAGCTTACATTCTTTTCTGAAAAATGCAAC
GACGATGCCAATGTTTGTTGACCTGAAATACATTGTAAAACATTCATAATACTTTGAGCAGAGCTTCCAAACTCCCA
TTTGCCTCTTTTATCTCCCTTACCTTGGCCCCTTTTTGAAGGCAATGTGATATTTAATCCGTTTCTATTGATGCTTC
AAAATTATTGAAAAACTGGTAATTGTATTTTTCCCTTTACTTATCAGTTGCTAGTTGACAATGAGTGTTTGCCCAAA
CAATAACCAATCAAAAGGTAAAAAGGAGATTCCAGACATATCTGAGAAGAAATTCTTTGGAAGAAGCCCGTAAATGG
AATGGGAATTCAAACAAAGCCGTTTCCAAAAGAAATACTAAATGGTCTCTAAATGCAAAAGGATTGCTCCCCAAGCA
TTTTATGGGAGCATAAAAAGCTCCCAACACATTTTATGACAATACTTCTACTCAATGACTTCTTGTGTTGACATATT
TGTTGCACTCGACGTTAGTATTTACAGCTTCTTATCCCAAATATTTACTTAACTGAAGCCCTGATGTTTTTAAAAAC
TTTTCATCTGTGTTTAACAGCCCATTTTACAGAAACTTATTTGTTTCATCAGGCAGATATTTACTGAGAACTTGCAA
GTGCCATATATTCTAAAAATGCTGATGATAAAACTGTGAACACAATAGATTCTCATGGTGCTTATGGTCAGGGCTAG
CACACACACTTGTGAAATGATCACTGATGATCAAAGGCATAAACACTACATTTGGAAGAAATACCGAGGGATCCAGA
AGTATCTTGGAAACACTAGCAAGTATAGCAGATGGTGGGATTGGTGCTTCAAAGAACTTCTTGTGGAAGATGTTACG
TATGTACCTTCTCTGTGCCAGGCACTGCTAGGAAGTGCTGGAGAGAAAAAGATGTGCTAGATACCGCCTCTGTCCTA
TGTGCTTGTGCTTTGTGGGGAGGTGAGTAGGATAATCCCAGTTCTCATGCAGTGTAATGAGTACCATGACGGAAATG
CACTCCAAGAACTAGGCAGCATGACCAGAGATAGGACATTTGAGAAAGACTTCACTCGGGTGGTACTATCTTAGTCT
GGGTGCTAAAATAGATGTGATAGATGAGTAAGGGTGACCCGGAAGCAGGAGGGAAAGGGAGGGGCTTTCAGAACAAC
AAGTGCGAGGACATTAAGGTGAAATAGAGTATAATAGTATTCCCAGATCCTTGGGATTGTTCTCCATTAGGCTAAAA
CAAAGGTGTTTTCTCTTCTTTAAGATTTCATGACTGCAGATTGCATAACAGAAGGTCATTTAATAGACCTCTAAACT
GAAGGAATTCTTGAATTAAATCACAACATATCTTCCATGGCCAGAGAAACCATTGCCTCCTTATGTCGACATTACTA
ACAGCACCAGCACCTGCTGCTCAGGCCAGCGGGAGGGTTGGGTGTTGCTGCCTAGGTAATGCTCACCAACTGATGTC
CTGCCATGAGTAGTTTTGCCAAGTTCCACAAAAAAAACTTAGTGTTCTATCAGCATCTAATGAGAATTACAGTCATT
AGTTAAATAAAAGAACTATTAGATAAGGAGCAGAATGAACAACACACAATCCATCAGCTTGGTGAATGGTATCAGAT
GGTTTCTGGGTGCTGGGCAGCTGTGCATCCAAGTAGACAGGGAGAATATATATGTCCTTTGCCTTATGTACTTGTTT
CTCTAATCCAAAGGCACAGCAATCCGTGGAAGCTGCTATGATAAGGTGTTTAGTGGTGAAAATGTCTTGAAAGCCAG
TAGATTATTAAAGTGATGTTTTTAAAAATGCAGATGGAGAGTAAGTACTTTTTATCTAGAGTAGTAGTTCTCAAAGG
GAGGTCCCGGGATCAGCAGCGTTAGCATCACTTGGGAACTTAGACCTGCATGGGCCCCATTCCAGATCTCACTTGAA
AACTCTAGGGGGTGTAGCCCGGCAGTCTTTGTTGTGACCAGCTCTCCAGGGGGTTCTGACACTCCAAATGTTCAAGT
TTCAGAACGCTACTCACAGGCCATCATGCTCGGCATCACCTGAAAGCTTGTTAGAACTAGAAAGTCTTGGCCCCACC
CCAAGCCTACTAAATCAGAGTTTTTGGGAGTAGGGCCAAGAAAACTGTGGGTTAACAAGGTCTCCAAGTGATTCTTA
TTCATGTCAAAATTTGAAAAGCGTCGATCGAACTGTTGGTTCTCAGCTTTGATTGCGTATCTGAATCACCTGGGGAG
ACAGTTGAGCTATTCCGGGCCCAGATCACATCTAGACCAATTGAATCAGAATCTATGGAGGCAGGACCCAGACATCA
GTATTTTAAAATATTTCTTGAATGATCCCAGAGTGTAGCTAAGGTTGAGAAACACTGTTCTAGGATTAAAGGATTAA
TGTGTTTGAGAGTATGTTAAGATCTTAGGCAAATCACAAGGGTGTTAAGAACTACCATCTTCGCAAAAGGAGAATGT
GCCTCAGATATTCTGGTACTGCTTTGATTTTACCTTCAGTAGTCTTACCTATTTTGAGTATGCTTAGTAGTACTAAT
ATGAGGCTTATTACTAATATGTTAAAATTTGTCTTTTAATTAAGTGGGTCTAAACGTTTTAATCTTTAATCTCTGAC
CCAACTAGAACTTTTCTAAACATTTTCATAATAGTCTCCACCTTGTCTTCTGACCTTCACTTATGTTCTTTCAGGGT
TCTTCGTGTGTTACTAGTAATAGTAATGGCAAGTGTTTATTGAACACTTACTATGTGAAGATTCTAACTGGCTTTTA
ATAATCACATCAGCTCTGGGAGGTAGAAGGTAGGGATCCTCCTTGCTTATCAGGTGAGAAAACTGTACTATAGAGAA
GTTAGCAACTTTTCCCAGGTCATAATATGTGACAGCTAAAGGGAGCATAATGGTTGGAATAAAATAAATCTACTCTA
GTTGTACCGAAGGCTCATATTTGTCTCACGTACTTGATTTGGTCGAGGCCCAAGGGGTCAATTTCCAATGCTTGGAT
TCCTGGATATGTAGAGTTGTATTAAAAATGCTAAAAACCTATTATGTATCATACAATCATACATATCACCTAAAGTA
TTATGGAAATGAATCTGTATTATTAAGGGAAAAAGGCCTGTGTGAAGAACAACTGAAACTTCATTTTAATTGAAATT
AAATAACATGCATCATACACTAAAAGTGCACGTTATGACCCCATGAATTACTTCAGGTGGCTTTGATTCATGTTACA
TACACTAACAAATATAGAAGAGTGATATAATGCTTCTTAATTAACTACTAATGGAAGTTTACTATTTAACTGCTTCT
TATGTAAGAATGTAAATGTTTTCTGAAATATCAGAACTTTTCATTAGGAAGCACTTTTAAAAATAGCAAAACTGATA
TGCACTATGATTTCCATATACATTAAATTGAACTTGTAAATGATGTTATAAATTATAGAAACCAAGGGGATGTTCAA
ATTAGATATTTGTCTAAATAAATCATGTATGGATTGAACAAATACTCATTGAGAAATAAATGTATTCCTTTTCTTTC
AATTATCTAGGATTCCTTGTTTATCTCTTCAGAAGCAAAATGTCTTCTGTCCGTTTTATTTCCAGTTAAACATTCTT
CAGATTATGTAAATAAGTTAACTTCCAATCCTCTTATTTCTGTTTATCTCACCACTCTTCTAATTTAGACGTGATCA
ATATCTTATCTTTTTGCATTTCATAGACATCAGGATCCAGAATAATTGAGTGAGCTCAAAACAACAATGGCAAGAAT
GATGTTTTCAGAAAACTCAGCAATCATTCGTTTAATAAATATTCATTGCCTACCAACTATAAGCAAAGTATTGGCTA
GGCCATGTGGGGTATACAAAAATGTATTAAATATGGCTCATTCTCCCTAAGAACTTACACCTATTAGACAAAGTACA
TGCATAAAAATTATAATGTATAATAGAAAATAAATACAAGCCCTAGAATGCACAGTTGAAGTACGATTTGCATTTAT
TATAAAAAGAAAGATGAATTGGCTGGGCACGGTGGCTCACGCCTGTAATCCCAGCACTTTGGGAGGCCAAGGTGGGC
AGATCACGAGGTCAGGAGTTCGAGACCATCCTGGCCAACATGGTGAAACTCTATCTCTACTAAATATACAAAAATTA
GCCGGGTTTGGTGGTATGCACCTGTAATCCCAGCTACTTAGCAGGCTGAGGCAGGAGAATTGTTTGAACCTGGGAGG
TGGAGGTTGCAGTGAGCCAAGATCTGGCCATTGCACTCCAGCCTGGGCAACAGCAAGATTCCATCTCAAAAAAAAAA
AAAGGAAAGAAAAGAAAAGATTAATTTCCTGTTAGCTAAATCAAGGAAGGCTTCATGGAGAAAAAAATATTTCAACA
CACACTTGACGTAGCAGTGGGATCAGGCTGATGTTAGGGAAGAATGAATGACATTCTACACTGAGAAAGAGATATTC
AGTATATATATGAAGAGCAGTAGAGAAACTAACAAGTGGAAATAGACTCAATTTACAATACTTGCCTGCCTGGAGTA
CTCTATACGTTGACTGTAAGTTGCAGTTTACTCAGAACAATCCCACTTTCTACTTGTTTATCCTATGTAATCATTTA
TTGGGCCTCCTTTTGCTCTCAAAAATATCCTTGTTTGGATAATAGATTATCACTCTGTTCCTAAATGAACTGCCCTG
TGTCCTATCCCAGTAAAAGGGTGCATTCGGGCCCTTCGTAACTGCCTCCACTACATGGTTGATTGAAACCAGAGCTT
GGCATTAAGAAGTTAGCTGAACAATCAGATTTCTATTCTTGGAAAACCCAAGAATTTCAGAATAGATACAGAAGCTG
TATAGCTTTAATAACATGACAGAGTTGTAGCCTTGAAAGCTATGTACAATTCAGAATTATGAGGGAGAAGAAATTGA
AGAAACAGTAGCAGCCGGGTAAATGCAGAAACAAATGAGGGAGACACCTAGGGGGTGACTGAGGCACAATAATGGAA
GAGAAGTGCAGTGAAATTGCTTGAACTCTTACTGATGAGATTTCTACTGTTGCCTTGAATCCAGGACCACCTATATG
TTCATTCTTTGTCATGCTCAGAGTTATGACAGATGCTGTTATTGAATTCCCCAGAGACTCCCTTATCGTCTCACCTC
AAACCTTACAATAATCCCTTCTATCTTTCTATCCATCCAAGCTGGCTTAAGTAAAGTCTATGATCCATATTCCTAGT
AAACAGAGAAGGGAAAGAGACTGAAGGCAAAGGCCCCAATTAGTAGGCTATTGCAATATTTCAGGGAAAAGGCAATG
GCCATCACATTGTTGTCCCAGGAATGAGAATAGAAATGAAAGAAGATAATGAAAGTTGAAAGGACTGGGGGGGCTTG
ACAACTGTTTAGACTTGAGGAGTCAGATAAAATAGGAAGCCAAAGATAATTCAGAATATTTTGATTTTGATTTTCAT
CACCAAATAAGATAGTAGTACTATGAAGAAAAAATGGTTAAAAAACAATAATAATAAAGAGAACTCCTCCAAATAGT
ACCAAGGGAGGGAGTTTAATAGAGGAAATTAATTCCGTAGGTGATGAGAGTCCTGAGAAGCCAAACGAGAAAAGATC
AAAACAACCCAGGGATTGGCAGTCGCAGGAAGCTGTTCTCACTTATGGCTGGGGCTTTAAGCACAAGGTGACATGAG
ATTTCAGAATTTGAAGTCGTCTGGAGGCAGCTAGGATCAGGTGGGGCCTGTCCTGTTCGGCAGGACCTGCAACCACA
GGAGGAGGATGCGTCAAGCAGAAAGTTGGAACACAAGAGGGGATTCAGCCATAAGCCACAAAATACCTTCCAGAGCA
GAGAGAAGGAGAAATACCCTGAATTCCGTATTTTCCCTGCCATTTAGTTCCCTGCTATTGCCACACATTGACGTATT
CCATCCAGAGAAGTCCATTGGCATATGAGTCTGGGAAATGTAGTTCCCAGGGGGACATGATCTTAAGGGAAATAGAC
AATGACTGGTGCAACAACTGACCTGTGTGAGGCAGGAGGGAAAAAACAGGAATAATATAGTTTTTCTCTAGATCCCT
TCATGCACAAAGATGCAAAAGAAATGTGTTGGCTTAATGAGCCATTCTGGGTGGCCCTGTAGGTGGCTGTCCTACGA
ATAAGATTTTTAGACAAAACAGAGATGACTTCAAATGTCACAAGAAAAGTATCAGACAGGAATTAATATTGACTTGA
TCTGTCACAGGCGTCAATGATTTGCATTAAGCCAACGATCTTCATTGTTAATGTCTGGGAAATTGCCAGCAGCATTA
CGACTACTTGTGTGGATTAGTGTAACGGATTCCCCCACTAACATTCAGGAAATCATGTCAAGCACAGAGTGCCTATG
TAAGAGTGGTTGTGTCTATTCACTACATTTCTTGGACTAATAACACACTTAGCCTTCCTGAATTGCCAACATGTACA
AAACCAGATTGGGGTTTTTTAGTTGTTCATGGAACTATCATTTATTGGGTAGCTCCTGTAGAAGCAAGATACAGAAA
CTCTAATTAGGAATAAGACAGTCCCTGTACTTCAAAGAGCTCTCAGGGGAGGCACACAAGTAAACAAGCAATTATTA
TCATACGTTAGGATAATACCGTCATGGTGATAACCACTGAGTGATAGCCAAACACATGGAAGAGGTACCCAAGTCTA
ACTTGGGGTAGTCAGAGACTGCTTTCAAGGATATCCGAGTAAGTGTTAGCTAAGACATGATACGTATTTCTAGGAGG
GAAATTTTCAAGGCAAGGTGGAGATTGTGCAGTGACGCCCAGAGCCTGGATTATTTTGGTGACTGCTAGTATTTCAG
AATGACTTCAGCAAAAGTTGTAGAGAAGATAGAAGACAACAAAGTATAAGCAGAGGCCAGATAATGAGGACCTGGAA
CAGTGGTTTGCTGGTAAATGTTTAACAAGAGGCTCTTGGCGGGGAGAGAGAGTGTCTGATTTGCAGCATTTGGCAAA
TTTTGTTGCACAAATGCTCCAGCATAGCCAATTTCAAGCTACCAGTGTGACGTCATTGAATGCAGAATTGGAAAGAA
ACGGGCAGTAGCACAGCATTGTATAGTTATTTTCATTACCCAGATATAATAGATAAAATATCCAGATGGTATTTAAT
AGATATGGATGCAAAATTTAAATATATGTACATTCATGTGCTTCATGTTACTGAATGCGCACAACATTCATTATCCA
TTCATTCACGTGTTAATTTAACAAACATTTCTGAGCCTCTGCTCTGTGCCAAACGCAGTTCTAGCTGCTGGAATTAC
AGCACTGAAAAAAAAAATTTGTCCTCACTGAGGTAAGACAAACATTATTATGCCCATTTTACAGCTGAGAAATTAAG
ACATATGAGGATTAAGCAGTATAGTTAAAATCACACAATTGGTACATGAAGGAATCAAAGAGGAAATCAGCTCTCAG
ATTTTAAATCCAGGGACTCGTTTCTGCTATACCATACTACCTACCTAGTTGAGCTGGATTTTATCATGGTTTCCCTA
TTTTTATCACCATGTGGTTGGATAAGTAAAATAAATATATGTGACCTTTCAAATAAATTTGGGTCATTTTTCTTGGA
AGCTCATCTGGTGTGAACTTTAAAATACTGCAATTAATAATGATTATAATACCCTGGAACTCTGTAGCAACCTCTTT
TGAAGAACTCCAAGGAGCCTCTAAATGTATCAAACTAAGTTCTTCAAGTGAATTAGTTATCATCTGAGAGTAATATA
GACTTTTAAAAATGCATTAATTGTATTAACCCTTTCAGGCCCATAGACTTAAGTGTTTCTTTCTCCAAATAAAAATA
GTAATCTCTGTCCATTTTCTTTAGAGAATAATGAAGTAATTTTCATTGAATATGTAGTCAACATAATTACTTCAATT
CAATCGTGAAGGATTTTAAAAATTATTTATGTCTACTAACTTAAAGACATGCATAGATTTCAAGAACTTAAAAATGC
ATATTGCCTCTTTGCCCTATGCCTCATAAAACAAAATTATGATAACGTTGTGTGTTACAGAAAAACGCACTGATTGT
AATGAAGGGTGCTTCAAAGGCCATGAACTTGGAAAGCAACTTATTTACAGAGACCCCCAGCAATAGCAGCTAAAAGA
TTGACTGACTCCCTTTATTTTCAGTTATCCTTCAGACACTTTTGACCTCTTCCTGTGCCTTTCTAGTCATGTGCAAT
CTTGTGGATATCTCTTCCTTCCTCTTGTTATTTTCTATTTCCTCTGTTTCTATTTGTTTCTAAAAATAATCATGTTT
GAATATAGGATTAGCTTCCTTCCCATCTCCCCATTACCAATCTCTCACTATACCGCTATGTTATTAATCTTCCTGAG
AAATATATCAGGTTCATTACATTAGTTACCAGCTCAAAACGTATCAGTGGCTTTCTAGTCCTCACAGGCTCAAGTTA
ATCTGCATATTCTGACTTTCATATTCTGGGTTCATGCAAACTTTTCAACTTTCCCTCTTATACCTACTTAGGAGGAC
CCTCAGGTTCCATCATGCTCATGTTTCAAGCCAGAAGTTCTCCTGCCTCTTCCTCTATGTAGACTCCACATAGACTA
TGATATCCTGCTTCTCTTTTAATCCTCCATCTTCAGCTCACAGCCACACTCCTCTGTGAACAGTTAAATGATTCTCC
CACCTCTTACCTCCTATAGCACTTATTTTTCATGCAGCATTTTTGAGACTTAATTAAATCTACAGTTTTAAAAAATG
TTTTTCTACCACAGTCTCTTATTCATACTAAAACTTTCAAGTCTATCCATTTTGCTTATACAACCACACCGTTAGGT
CTTTTAGGTCCAAGAATACAAGAGAATGGCAAAGCACGTTGTTTACATCCACACATACTGTGTAAATTCAGGTAATT
TTTTTTAATCCTATGATCCTCAATTACCTCACCTGTAAAATAGGTACTACTCATACTGCAGAACTCTTGTTGGAATT
AAATAAATGAGTGTATTAAAAATGCTCAACAAGATTTGGCACAAAATCGGTACTCAGTAAATGCTAATCATTATTCC
CTTTCTCTTCAAAGCTCCACAATTCTGTATTCATATCACCCTCTTTATATCATTTGCAAAAATGTATCCTATTCCAA
CTCTTTCCACCTAGCCTCAACATTTACAAACACTCCTGGTGGGAAGGGAAAGCTTTTGAGGAGAGCACATCTATACT
CATTTACTTCTCAGGGATGCAAGCTGCCCTGCTTACTGAGGGCATATGTTCATAGTCACACCGGAGCCCACTGTCCC
CTTATACTCTCAAATGGGCAGTAGCAAATCATCTTGATCGGTAGTAATGACCTGTCTCTAAATTTTCACATGCATCA
GATAATTTCTTTTTTAGTAAGTGTTATCTTACATATATGCCAAAATATCACCATTATATGGAACACTAGCTGAAAGA
AAAATTATTCAGTAGTCTTAATTTTCTAGCTAACATAAATTCTCTCCATTTTCATCATCCATTTAGATTAAAGACTT
TACTGTTAGCTGAATATTCAGAGACTTTATTCTGATTTTTAAAATTTATGAGGTTCATAATGTTAAGACTTCAAGGG
TGAGCTGTTTGTGTCATTTATAATGCGTGACTAGACAGTAACTAGAAAATGGATTGTTGACTTTACAAGATTTCTCC
CCACCACGTCCCCCCAAACCTGTGCTGCTGTGTATTTGGCCTGAAATCTTTACTTCTAGTCAATCTTTGGACCTAAA
GCCTACCAGCTTTTAGCATCCTTTAAGATTGACGTGTCTCTGGGAGACCAATAGATGCTAAACCAAATTTCGTATGC
ACTTGGCAATATAGGATAATAACAACCATACTCCCTGCAATTGTTTCCTAACACAGATGTAACAAATTACCACAAGC
TGGGTGGCTTAATAGACATTTATTCTCTCACAAATCTGGAAGCTAGGTGTCCAAAATCAAGGTCAATTATCCCTCTG
AAGGCTCTGGGGAAGAATTCTTCCTTGCCTCTTCCAGCTTCTGGTAGCCCCAGGTGTTCCTTGATTTCAAGCAGCAC
AAGTTCAACATCTGCTCCTGACCTCACATAACCCTCTTCTTTGTGTGTCTTTCTGTGTCCACTCTTTTCTTTATTAT
TATTATTATTATTATTATTATTATTATTATACTTTAAGTTTTAGGGTACATGTGCACAATGTGCAGGTTAGTTACAT
ATGTATGCATGTGCCATGCTGGTGTGCTGCACCCATTAGCTCATCATTTAGCATTAGGTATATCTCCTAATGCTATC
CCTCCCCCCCTCCCCCCACCCCACAACAGTCCCCAGAGTGTGATGTTCCCATTCCTGTGTCCATGTGTTCTCATTGT
TCAATTCCCACCTGTGAGTGAGAGTATGCAGTGTTTGGTTTTTTGTTCTTGCGATAGTTTACTGAGAATGATGATTT
CCAATTTCATCCATGTCTCTACAAAGAACATGAACTCATCATTTTTTTATGGCTGCATAGTATTCCATGGTGTATAT
GTGCCACATTTTCTTAATCCAGTCTATCATTGTTGGACATTTGGGTTGGTTCCAAGTCTTTGCTATTGTGAATAGTG
CCGCAAAAGGACACCAGTCTTTGGATTTAGAGCCCACCCTAAATTCATGGTGATGTCATTTTGAAATTCTTAACTAA
TTACATCTTCAAAGACCCTATTTCCAAATCTGGTGACATTCAAGGTTTCAGGGACATGTGACTATTCAGGGGAAACT
ATTCATCCCACCACATCCCCCTTGAAAATTCTGGAAAATGTAGTAATAAAGGCTTCTGATAAATTAGTGTGGAAAGT
ATTCACGGTTATAAATTACTAAAAAGTCTCACTGTGAGCTCTTAATCAAAAGGCCCTATAAAACATTTATTTGCTTG
ATTAAAACTACACATCCGATATTTTGGTTTTGGATTTATTATTATTTTTAGACTTGGAATAACTATTTTATGTGAAA
TAGATTCCATAACTGAAGCAGCATACCTCTCAATTTCCCAACATTTATTTTATTATTTTTTGTCTTCACACTACTTA
ATAACTGAGGAAAAATCATTTAGACCAAAGTTCACCTTGGTTGACACCATCCAGACAGCTACAGGAAATAACAATGG
AAACTAAATCTCTAAGAAAAAGAGTCTTTCATGTGAAATATTGCAGAGTTGATTCTAGATATATAGCTGTTGGAAGA
ATGGATACTATTACATAGATATGGCAGAGTGGTATCCAGCACCTTTCAACAAAGATCTTTCAGAGTCAGTCTTATTA
TGTCTGGAGAATTTACCCAGGGCTTAGGTGCTTTTACTGACAATCTAACCACCTGCACCCCACCCACCGTCTAAAGC
TAAAGTTTATTGGAAGACTTAGGAAATCAGTCTTCGGAATGTTTCTGAGACTGGTACACCCACCACTTCATTAAAGT
GCTTCACTTCACTTCATTAGACAAGAAGTAAAATACTTGTCAGGAAATTATTTATAGTACCATGTATATGGGTATCT
TATTTAATACTACTTAATGATGGTACTACAAGTTATATAAAATGGAGAAATAAGTCATCAAGTTTGACAATAATGAT
ATTTGATATTATCATTATCTTTTTTATTCGTTCCCACAGAAGTACTCTGTTATTGGTTTAGAAAAATGATATTTGAT
ATAATAAAGAAGGAAAAGGTGGTAATATTCTTTATTTTTTGTATCTTTATACCCCAGCTCTTTCACCAATCTCCCCC
ATCTCTGTAGTTCTCCTCTGGTGTCCCCAGGCAGTGAACTATTCCCAGTGGTTAGGGAACATCTCATTGAGTAAGTT
ACATCAACATTTCTTCACATTTCAGGACAACAGGAACAGTGCCAAATCCTAGCCCATTGTTCAACTCTCAAGCCTTA
TTATCCTAATAACACATCCATCCCAAGAAAGAATTCATCAAGATCAGAGAGGAATACGTATAATTTTTTATAGTACA
GTATTTAAAATGAAACAGCTTTTGGCCCGCGTGGTCTCAGTGGGCTCAAGGGGGAAATTCAGGATGCTAGCTCATCT
CACACCAAGTTTAATAAAGGGTGTCCTATAAAAAGCTAATTTCTTGCTGGTAAATTGCTTTTTAAGTAATCCTTGCT
GTTGCAAGAGACCCATTCATAGCGCTGACACTGGGAGCCATGTTGGAAAGGCTAGATATGCTCTGGGAGATAAGGTA
AGATCCAGGTGGAATCTTCTCTTTACAGAATGACAATGTATATAGCTAATATTGTCCTTTGAGGCTAGTTTGCATGC
AGTTGCTGGTATGGCACTGCTCAGCAGCCTGCTGCAGATAAGAATGAGTGATGATGCCCTAGATTTTAATGGAACTT
TTAGAGTGCATGCAGCAGTGGGGTGCAGTCTTCAGCAAAGAAAAACGAGCTGACTTGCAGGCATGAGAGATCATCAA
GAAAGATAAAGAAATAGGACATCCACTCTAGGTTAGGCAAGGCTTTTTAGAGGATATTATGGAAATGAGCAAGAACC
AATTTAATTTTTATAATGCCACTCCATTTAACTTTAAAATACAAGGTCAAGGTACTGTGTTTTTCATAATGATTAAA
GATTTGGAGCACTCTTTCTGTTGAAACATACTGCATCTGTTTGGCAGAAAAAAAAAGTGACAAAGAATAAAACTGGG
ATCAGAGAACAACAAAAACATATTCTGTCACTTGCCTAACACAAGTTAAAAAGCAAAGGAAAAAGAGACAACTCTGA
TGGACATGTTCATCCTTATCCCAACAGAAGGATTTATTTACCTAAGGTCCTATTATTTCAAGTTACTTTGATCCCAG
GATGGTAACATAAAATGTACATTTTAAAATAAAATGGAAGTATAAGATCAATAAAAACCACATATCTGTGGATAAAA
CAGCAGATTCAATCTTGTGGCTGAAAGTTTGCTTTAACCCAACATTTGGTAAACTATTCACTCTGTAATTTATTAAA
AGACATACTGTTATTATAAAACTATCTCAGTTTGCATCTTGTTGGTTCTGTCAAAATTTCATCCTGCTAATTCTCAA
CTTGTAATATCTCTGATATACATGATTAATCTATTTTAGGAATAAAACAAAAACTACCTTTATCTTACGCATTTCTA
GGAAGTGTTTTTAGATGTAAAGTAGGGGTAATTGTAGTATAGTGGAAAGGATTTTGAACTTGAAGCCAGAACATATG
TCTCTGCCAAAAACTAGGTGTGTGACCTTAAATAAGTTACTTAGCTTCCTGAATCTTAGTTTGTTTAGCTTTTTTCT
ATAAAGTGGCACACCTATCCACATCACAGTTTTGTTGTCAAAATTAAATAAAATACTATATTAGAAAGAAACTTTTA
GAAAGAAATTTATAAACTGAAATGTACTATACAAGTTTAAATCATTCTCATTATTTTCTTACCCTAAAATTTTGACC
TTATTTTTCTTAGCAAATGGCTGAATCTGTAAAATTTAACCCCCACGCAGCATCTGGATTCAAGAGAACTACGGTCA
TTTCTTTATACAGAATACTAATTATACACATATAGCAAAACACAAGTTTTTTCCAACTACTCTGTGTTTTTAAAGAT
TCAGTGTGGGCAGAAGGAATTTTATCAACTATGTTAGGGGAAAAAAGTCTGAAGAAATGAAAATAATGAGAAAAAGC
ACTGTTGATTTAAGTGCAGGAACATAAAACTTCAAGGCAAATGTGAGGCCAACTGAGTTCATATATATCCTCACAAA
ATGATTTAGTTAATTTAAAAACTTTTCTAATAAGCAACACAGGTAATCCCAAATTCTATCTTTTATAGCTCTAAGAG
TCCCCATAATTTATTCAGCAATTATTTACCACCCACTTATTATAAGAAAAGCCCTGGGATAAGTCTTGAGAAGAAAC
TAACAAAAACAAAACTTGATTGTTTGCTCTCAAAAAGCTGGGTCTAAAATAGGCAAGGTAAGATTTTGTTTTGAGGA
GCCCGTATTTTCCAGCACTGTCCATTGTAACATTAAAATAGTTTGCCAAAATCCTCACTCTGTGGGTGTATTTGCCT
AGGGTGCTAAAATTGCTTAAAAACTTTGTTATTTGGCTAACTAAAATCACTGAATAGTAAACAGTAGCATTAGAGAT
GGCAGAGACATTAGGTGTCATGCAGTTCAACTGCTTCACCTAGCAGACAAAGACATTAAGTTCCATTTCTTAAATTT
AACTATCTGGTTGAGGATACACAGTAGCAGAGCTAAATCAAGAACCTCTTGGGGTTAGAGTTTTTGTTTATGCATTA
CTTTGTTTTGGAATTAAAAACAGTGCCTGTTTGCTAAGTTAAATTGAAAATATGCTCTGAAGGAGAAAAACAGCTAT
AAAAATAGACTTAACTTCCAAACTATGGATCACAATAAACTAAAGAAATAATTTCTGTAGCAATAAACTCCAACACT
TTCCATAGGACCAGAAAGGCTTGAGAAAGAGGAGAACAAAAAAATGCTTTGGGGCTTACCATATATATGGAGAAAGC
TAAATGAATAAACCAGTTGAAAGACAGCGAGTTATACTAGTAACAATATTACTGATATCGGAGCTCTCACTTATAAA
TTGTATATTATGATCATAGTGACTAGGTACTTTATATCTGCTTTCTCATTCCTTCCTCACATTAATTCACATGTAGG
ACAGATTACCTCTTCTGTTTCTATCCAGAGGCCTAGAGCTCAGGCCCTCATCGAAGACAGACAGAGCTATCATCCTT
ATTCTAAAAAAAAACTAAGACCCCAGACATAGCTGTGCTACTTATAGACTAGAATGTGAGAGAAAAAGACAAGCTTT
CATCATGGGCTTAACAAACTGAAACACTTCTTCAATTTTGAGATTGAGAAACTTAGCTAATGCTAGGTGTAAAGATG
ATATGCTACCTTCATAACCTTGGTGAGGAGAAATTAGCATTTCTCTCAGTCCTAGAAGGAGGATGACCATGAAGGTC
TTCATTCTCTTGAGAAGATAATCAAATGCTTCACTGCCCTGTTAACGGTTTACTCAATATTCACCAAGAAAAGTAGA
TGGGATTATTTTTGCAGACACTTATACGGGTAATTTATTCTGATAAGCAGAGACATACCTTTAGTGCATAAATTGTT
CCCTTTGTGCTCTTTGTAATAAACATCACCATAGAGAACAAACACGAAGTAATGACATTGAATTAAAAGACACCATA
GAGGCAACAGCGACTGGAATTTGTGAAAGTAAAAGGATAGTGCAAACAGTTGTGCGTTGCATTCTGCTCTGAAGATT
AACAAGCTGGGTCAGGCTTTGACCATCATGATGAGCAGGAGATTTTTCTAATGGAAATCCCCAATCAAGTTCCTGCT
GCACCCAGAAAGGAACGGCTTACAGAAATCTTACATTTCTTTGCACATACCAAATTGCTTGGCATATTCTATCACAA
GGTTTACTTTCCAGGGAATGTGATCAAGAAATCATGATCCTAATTCCTAGTTAACCCTCAAAGTTTCTCAGAACAGT
CAGTGCATCACTGTCAACTTTTGTGCAATGTGGAAATCAGAATTGGTCACACGTTTTTCCGGCCACTGTTTTAGATT
CATATAATATTAGTGAAATCATGTCAGACTGGTATAGCCATGAATTTATACTTCATGAATAGGCACTCAATAAATAG
TGGATTAAATCGACCGATTTGATTTTTACCTCCAATAATTTCAAAAATATCATTGAAGACAAGGTTGTTGAAGCTGT
CACTTTTCTTGCTGAACCTTTGTTGTGCCAGGAGGAACAGATGGTAAAATCAAAAGTGATTAGAGAATCAGTGGGGT
GGGGGTGAGATTGGAGGGGAGAGGTCTTCCCAGTGAGACCCGCTAGCGTCTTCCCTGAGCAGTATGTTAACCCAAGA
CAATTTTAGAAATCTGTGCCCCTAAGTTGCTTGACATCCAAAGCACACTTGATGCATCCTACATTTCTAAATATTTT
TATTGTTGTTTCTCGGTAGTAATCATCTGGTTTAGTCACTCTAAAAGTCAAGGATGAAATTTTAAAATGCAAATAAA
AGTGCCTACTTTCTCTCTTTCCAATTCCTTTTTGTTTTATTGAGGTATAATTTACATGCACAAAAAAATCGCCTTTT
TAAAGTGTACAGTTTGATGAGTTTTGACAAACATATGCAGTCCTACAACCACGTCCGTGATCAGAATAGGAAATATT
TTTATCACTTCAAAAAGTTTCCTTGTACTCCCGTTGCAGTCAGTCTCCTGCCCCACCCCAGCCCCTGGAAACCACTG
ATAGGTAAAAGCACTTTTAATCTGAAAGGTATTTAATGTATGGCAGTGTCAGTGGTAATAATAACAAGATTTATTCA
TTGGTTCACTGTATTTTTGAGCACTTATATGTGCCCGTTGTATGCAACCCATTATGCTCAACCCCTGCCCTCCTCAC
CAGGGATAAACTAGTGGCAGAGATAGACAAAGAAGCCGTCTCTCTATCACCCCTATCTTATAGAACATTCTTCAATG
TTAGAAATGCAGTATAATGTGGCCATTGAGAACTTGAAATGTGCTTAGTGGGAATGAAGAACTGAAGTTTTAACTTT
ATTTAATTTCAATTAATTTAAATTTATATAGCCACATGTGGCTAATGACTATCCCACTGGAAAGTACAGCTTCTATA
CAATATGATAATATGATACATTATAACGCAGGAGTTTAACCAAGTGCTAAAGCTTTACTATCACCAGGGTCACTGGT
GTTATGTGAAAAGAAAACTTACAATAGAAAAATAAATCCTTTAAATAGTCACAGACCTGAGAAAGTTTCCTTCTCAA
GGGAACACACATTGGCTCATTCAAAGGAGGTTAAAAACTAGCATTTAAGGTAATTTCATGAAGCTTTCCTTTGGATT
TCTCATGCTTATTGTATACATAAATAGGCAATTTTCGATGGGACCTAATAAATCACTGTTTTTTATTTGAACATTTT
AACAAAATTATCAAACAGCATTGCATTTATGTTCAACCTATTTGTTCTGAGAAAGACAACGATTAAGTAGAAGTCAT
CAAAGTTACCAGAACAATTTTTGTTCTTATGTTTTAGAAGGCATTGAAGGTGTTTAAAATGTACACTTATAGAGTCA
GAGTACTATGCAACTGTGGCCCTTATAGTTTATCCGTCATGCATCTAAAGCCATTGTTACATCTGTTTCTAATTGTG
CATGGATTGTCCAAGATACACAATTGGAAATTCCATTTTATTTATCAATTTGAAGAGGTTTCACCCATGTGGTCACT
ATGATCACTATGGAGTCACATTAAATTGAGAAGTCTCCAGAAGTTGCAGTATTTATTTAAAATTCTAACTTTCTTCA
GAGGAACAAATTCTCCATTTCTGGATTCTGAATCCTCATTAGCCATAAGGTTGTTGTAAGAATTTGCAGCTAATAGG
AACACATCCTGGGGAGAGACCAGTTGAAAAGTAACTTGGTTCTGAGTGAAATTATACAGAGACAGTTTCTACTTCAG
GTGGTGTTGCTAATGAAGCTATCATGGTAATTTTAGCCCATATGATCCCTAAACGACTTCAGAACCACTTTTCATCC
ACTAAGAACCCACTTCAACCACTGCCACGTTCACTACCACAGTATAATATGGAACACCCTCTGGAATTCAGTAAGTA
ACTTCTTAACTCATTGGCTATAGAGCTTTGCCTTTGTAAATTCTTTCCTTTTGCAGTAAAAGAGATTGTTTCAAAGT
AATCCAATTAGTCCCTAGGCATGTCTAGAAAGGTAGAGTCAACAACAGTAAGGTAATAGTCCTTATAAGATATGTAA
GAAATTATCAGTCATTTACTTTAAAATAATTTGTACACTTTTCCTTTTATATGGTTCTTCTATGTTGAAGCCAGTGG
TCATCCAGTGATTAAGATTAGCCAAACTCAAAAGGCTAAAACTAAATTCAAATGGTATTATTTTGCTTTAATTTTAT
GCAATGCTATGTATTTAAATTTCATGAAAGTTTCGTATGGCATTGCTATCAATTTCAGTCAGGATAAATTTCCCGTG
AAATAATCCACAATTTTCAACTGTACGTTGGGTACAGGTAAGGAAACACCCTTAAGAGCTTATCCAGTTATTAGCTG
GTATTATAAATTTCAAGTAATTCAATGTTCAATTAATAAACAGTTACTTTAAATGGGAAAGTATGAGTCAAGAGTTA
GTACAAAGGAGAATCTTAAAAGATGAACATCAAAGAATCTTACTATTGATTTGTTGGTGCCTTTGCTTGCACTTCTC
CAAATTGACTTGACGTTTTAAATTTGTACTGATAATCATCAGAGTCAAATCTGCTTTTAGGCAAAAAGTATCCGCTA
GTTATTCCCCTACTATGAAAGTGATGAGATGAATTGATCATGTCTCCAGTGTATGGATGGATGTCTTTGAGGAAGAC
CTACTGACCTTATGTTTATCTTCTGTCAGCATGGTGTGACTATGTGGAGAGACAGTGCTATTTGCTAAATACTTTGT
TTTTCAAATAAAAAGATTTCACAGATTATGCATTGTAGAATTTATAAGTATTCTTTTATGTCTTTGAATGTGCCAAT
ACAATTTTTATGAAGTTGGAACTATTTTATCTATTTTAATGAAATTGTAAGCCTTCTGTGAATTCTTTTATTAATTT
TATTCTGAAGAAAATCTGACCAGGTTAGGGAAATCAGGTCAGGTTACGACGTGATCCCAGTGGAAAAGCTGAACTGT
GGACTGTGATTTAAAATAGGGAAGAGGTACTGAAGTGTTGTTTTTATTTTTGTTTACAAATCAGCCTTTCTAACTAT
TATGTACTCCCATCCTTCTATCTTTTTCTCCACCAGAACGTATTAACAGGCATGCATATAATTAATGCTTTTCTTGA
GATAATATTAAAATTAACTTCATCTGTCAGGCCGTCTGGGCTAAAAGTACACAGTCAGATCTGGGTAACATTTGAGT
TGATGTAAATATGCCCACACATACTGACAATGCTTACCATTTATTGTGTGAATGAAAAGCAGTGTAAATATTGTTTG
TTCTACTAGGGAAGCTCCACATTTTAATCAAACTTTGACCGTATTTCTAAAATGCCAGAGCATCTGGAATTGTTAAA
GGAACTGATAGTTTTTGTGTTTTTAACTGTTAGGATACTTGAAATCCAAAGGGTAAAGAAACTCAGCTGATTTATAC
GTTTCTTCCTCTTTATTTTAATGTGATAAAATGTAGTTTTTGTCATGGGCTGACAAACAGTGGTAGACTACACTAAC
TCTGCGTTTGCTGGGTTTAATCTTACCCTCTCAAGGCATGGAATGGGAGCTCACTTCAGACCCAGCCATGCTTCACT
GTCCACTGCCTTCTCATGGATATAGTGTGAACATTAATTAGATGAATTCCATAAAGTGCTTTAAGCTCTTTGGAGAA
AGATACTCGCTGCATAATTATTCTTAACTCCCATACGCTCTTATGATATAAACCATTCTGCCAGGAAATCCTTTTTA
GGGATTATCACTTAAAATGAAATTTTCATTATTAAAAGCAGGAAGAATATACATCTACTGACAGACGAAAATGTGCT
TAAGGCGACTGCTTTTAAATAGGCAGAAATCCTGAACTATGGAGCCATCCATGCCTGAAAATACTGAGTAATAATGA
AAACTGGTAGCAAATTTGGAATATTAATCATCACATTAAGTTGCAAAGAAAAAAAAATACAAGCCACATGCCCTTTA
AAAATACGTGCACAAATCTTTATTCTAGAAATATATAACTTTAGGCCTAAAAAAGTACAAAAAGTAAATTATTTTAT
GGCTCTGAAAGTATCCTTAATTTACTCAGGTGACAACAATTAGTGTTTAAAGAGTTAGTTTTCAATCTTAGCTACAA
GTTGGAATTACTCTGGAAGCTCTAAAAAAACAAAAAACAAAAAAAAATAGAGATGCCTAGTTCCCACCTGCAGAAAT
TCTGATTTGATTTTTCTGGTGCGAGACCTGAGAATAGGAATTTTTTTAAAGCTTCCCTAGTGATTCTAGTGTGCCAC
CTAGGTTGCCTTAAGGTAAACCTCATATTATGCAGAACCTAGCAATCACCTATCCTGATTTTATAGACGAAGATCAT
AAGACCCAAGAGGGCAAATTGATTTATTCAAGATTGAATATACAAATGATAGAAGATTCACATAAGATGCAGTATAC
AGAGTGGCTTGTGGATTCTTGCCAATGCAGGCAGCAGAATTTTCTTTAGGGTTCACCCAGTTCAGGCACCTCTTTGC
AGCAGCACTTGACTAAGGTTCTTCTGATTGGATCATTATATGGGCAAAAAGAAAAAGCTTAATTGAAAAGAGCTGAA
CCCACATTGTGGAATGGAAGATATACAGTTTACACGTTATAAATGATTAATATTCATGAAAGCATACTGCCCTTTCC
TCTTCCCTTCCCATAGATGACATCATTGCATTGGTGTAGTTAGGTTGGTGGTTTCTTGTTGTTGATCTTGGTTCTGA
CACAGTTCATCACTTATTATCCTGGCTTATTATCTACTTCTACATTCATTGTTCACTCACTCACTAATTAATTCAAC
ATGGTTTTTATTGTTTTGGACCGGTTATATGCCTGCAACGCTACGTAAGGCTGAGGATATTACAATGAACAGGAAAC
AACCCTGAAGTTTAAGGTATCAAGCCTTTGAGTTACTGTCTTTTATCATAGCTGATATAAAATTGAAGCCCCACTTT
TTTTGTTTTCAATTACTGAAAATTCAGTGCTAAAAAAATGTGGATTTTTATTCAACTAGATAAAGTACTACAATTAG
GTTTCCACTGACCTTGGCTGTTTTTGTTCCCAGTTGCCATTACATAAATCTGTGCCACTCACAACTTAGGAAGGGTG
TAACATTCTCTGTAATAGTTTGCCTTTCGAATAGTGTTTGGATTCATTACTGTCCCTCGCAGTTTGGAATAATGACC
ACTGAATAATCAGTGTTTGGAGACTAAATTAGTGCTGCAAAATTCCCTCAAATTACCTACTGTTCTTTTCCCTGTCG
ATGTATCCTCATATTCACTATGATTACCCTGAGAAGAAAGATATTGTTGAGAACCACTTTACCTACTCGAAGTTTTG
GTATTTCAAAGATTCATACTTATGTCATGTTGATTACATTAGCACTAATACTATTGGCAGAATTCTAATTCACGTTA
TTTTCTTTTTTTCCAATTTCTCTCCATGCCTATGTGTTGTCCCTTCGCAGCTATAAAGCCATGGCCGATTCATGGGT
GCTTTTGTTAAGGCGTTCAGCAGTCACGTTTGTAGATTTTTGAATGGGACTTAGAGCCCTTTTTTGTTCTTTATGTA
TTTCTCTATTTCTCAGCAAAGGAAATGCAGACATGCAAGAAATAGTGATCAAATGTCCTGTGTACTATTGTGGGTGT
CATTAATGGTATAGGGAGAAATAGAAAATAGTTGCAAAGATGCATTTAACAAATAAACGAGGTCTTGAGATTCACCA
TGAATGTGGCCCCTTCTATGAAAAGTAGTTAACATCCAACTGCAAAGTTGTACTGGATCAGTTTGACTTTAACCTTT
AGCTAATATGAAAATATGGAATTGTGTGGTGGTGCTCACAAAAAAGAAAACTCATTTTTCTTAATTATCATCAATTA
ACATGTACTGACTACCCATGAGGGAAAGTTAATTTGCTCTTGAGTGGAACCAGTTATTTGCCCTATTATTTCTCCCT
TGCTTATTCCCCTCTCCCTCCCTCCTCCCTTTCCATTCAACAAAGAAAAATAGATAAAGCAATTTCTGATTAGCCAG
TGAAAGCCTCTAACATAAAATTTCCAAAGATGTGCCATAAATTATCCACAAAATGTAAAACTTTTCAATTTTGGTTT
GCATTTTCTTTTTTCTTATTATAAAGGTAATAAGTGCTCATTATAGAATTTGAAAAATATAGGAAGTTGCACGGAAG
ACGAATAAAATCAGCCATAATCCTACAAACCTATTGACACTTGTACATATGTTTGTTATCTCTAATGCATTCATTAT
GATAATGCATCTTTTCAACCAATAGAGTAATCACTGGTGACTTTCAAATTTGCCTACTCATTTTTCACTCTGTGGAC
TTACTTTACTACCTCTTGCCCTTTTTCAGTAAATGAATAAATATTTAAGTAAGTAAATACAAATGTAATAACTTATG
CGCTCAAGCACACAGATACACACAGAGAGAATTTGGAACTTCGGAAATGCCATCCTCTCCCTAGGGCCGCAAGTGAG
TTGATAAGCACGTAAGGAAGGATAATCAGGGGAGCCTTCTCGTATTGCCCAGATGGCTCAAAATTCGTCATCTCTAC
CAAACAACTATTTGGAGCTTTGAAGAAATATCCATGACCCCTTTGAATTCTTCAGTTTCTTTCGCGTTCACTTTGAG
AACCAAGTGACAAGTGAATTTCCTGACTTGGTCTTTTAAACCTGTTAGCGCAGTTCCATTGAGATTTTGTGGGCACA
AGATTGCAATGAAGAGATCAACAGGGAGAAATTCATTTCCCTATATATGTGCGATTAATCCGGAGTGCTAAGGGCAG
ATATAAAGCAGGTGCCTACTCCTGTATAACTTGGAATAAAACCATTTCCAAAGGCTGATGATCCTCAAGTCTTGTTC
TGCAAATGACTGATGTATAACTTCAGGCCAATTTTTCTCCAGTTAGTCTGTGTCACTGGGAGTCCCATTTCTCGGGG
AGCAGCCCCATGCTTTGTCAGGTGCGGAGCCCACAGAAGGTTAATGCGAAAAGAAGGCCTCTTGCCAGACTGTTTTC
CAGATGATACGTAGGGTTATTAGTTTGAGCTCCTTAAGAAGATTTTTCTCACCTGTCCTACCAACTTATGTTTATTT
CATTGGTGTTAGAGGGTTTCAGTGGCGGAAGTAAAATATTTAGCGGGGAAGGGACAGCGTTCATGGGAATTTTGCCT
AACTTAATTTTGTATCTTTAGCTCATTCGTAGTCATTGTACTTTGTGTTTTGTCAACTGAATTTTGTTTGCATACAA
AGGCACAAAATGTTTGCTTCAGACCTGTCACTCTTATTTTTAGCATGGTTAGACAAAAACTGAGATGCTTTAATTGT
CTAACTTATCCCAGTTTAAGTGCTGCAAAATCTCCCAGGCAATGTCATGGGCAACTAAGGGATAAAATCAGAGATTT
AAAGGTGCCAGGTTTCCCACGCTTCTAACAGTTGGCGTTTTGGGTGTATACAATCCCTCAGCTTTCTTCTTTAGTTT
ATGGAGTCTTGTGGAGGGAATAGCAGGTTTTTAGCTAAAATTATCATGCTGTCGAGTTGGGTCTCTAGTGCATCCTG
AAGAGCTTGCATTATTTACAGAGGCTGGGCTATCATTTTAAATCCTGATGCTTCAATGCCCGTTATCATTCTTGACA
AACTCTTCCAGCCCGTGGTCTGTTTTCCTCTGTTTGCTTCCATTTACTTTCCTGAGCAACCAGCTGAGCAAAGATTT
ACATAACTTTTGTTTAAACAAACCCTGTACAGTTCACTCTTTCAGCCAGTATGTAAACACTTTTGAGACACAGTTAC
ATTTTTCTATTTTAGTCCCAGATTCTGTTTATTTGCTACATTTTTTGTGCCCACATTTTTGTCTTTGTTAAGTCTCT
TACAGATTCACATGAAAAACCAGAAACCGTGGCTGCTCAAAAGTCATTAATAATGAGATTTTTAGCTACTGTTTCTG
CTTGTAAATTCTTCATTTCACATAATACAGTCTCAAAAGGCCACAGAGAATTCAGCCTCGCTTATCTCTGTGTTGCA
GATGATGGCTTCTAGCCTTACCCAATCCCAGTGCAGCTTGCTTGCCATCCAGGAGTCGAATTTGTTTCCATCTGACA
TTAGCGTATTAAAAAGATTGGAGATCAACAAGCAACAATGTTCTTGTAGAAAGGTAATCAAGGTTTAGAGCCTGTGT
GTCATGAGACTCCTAGCATTTGAAACCGCTAAGGGGTTGACCACCATTGTCCCAAGCACCTGTTTAAGATTCTTTCC
TATGATAAGGGACCTAAAGTGATTAGCATACTGATAAGATTTTCCTAGAATAACCTATTTATTTCAGTATTATTCTT
TCAAATCTTAATTACCATCTTTTCCTTTACCCAGGGTCTTCTTTCTACCTCTACGACACATTTAATTACCTATATTC
CCCAACCTGTACCATATTAAATTTTGAATGGAAGTTTTATAGGGTAATTTATTGGAAGGATGGCCTTGAGTGTCATT
ATGTTCAATGAATGCCCTATTTTGACAAAGAGATGACTAAATGTTATTGAAATCTTTTTAATCCACCACGCTTCTGC
TTAGATGTAAATGCAAATCTGTTCTTTACATTTGTGATTGAATTGAACTTGAAAAGTACCGCCATATTGATTCCTTC
TGCAAATAAAATATAATTACATTTCCCTAAACTTTCTACACTCTCCCAAGAGATTGGCTGGCTTTGTATTGTAGATT
TTTGGTGATCACAGAGGACAATGCATTATCATAAGACCAATAAGATTTATTTTTACCTTGGTAAAGAATTTTAATTT
ATTTCTAGTTTCATTTTCATTTATATCCATCTCTTCTCACCCTCTGCTCTACAAAAGTATATATGACTATATAAATT
GAAAAAAATATCAAGTGCAAAATTACAGAAATAAATAATTAGGTTATTTTAGTGGAGGAAGGTTTGTTGTGGGTGGA
GGAGGAGAGGAGTGAGCCAAGAAAAACGAGGGACCATACGTGATCATATTTTTGCAGCTATTTTAAATTGTTTGTGT
ATATACTTTAAAATATTATAAAATAAAATTTTAAGTGCAATGCATATTTGGAGCCAATGATGAGGGATAACTTCAGA
AACGTAGCATCATCATCTAGTGCTTTCATAGTCCTTTCAACATTTCCAGATAGTTTTAATGGCCTGCTCATGGAGGC
AATGCCCTAATTTTAACATATCTCTTCACAACTCTGATTTCTTGCTTCCTAACATTAAATGTCTTCAAAGCTTCTTT
CACCACTAATTCCTTATCAAGAGGATAAGCCAGTTTATTCTTTAAGAAAAACTAGCTACACAAAACCGTAAGTCATT
CCAACATAAATCCTTCACTATCCTCTCTCTATAGATTTGGTTTTGATTCCTCCTGCTGAAATTCAACCTTCTTTCTT
CAGCTATCCACACGTCTTACCCTCTAACTTCCCTCAGGAGTGTCTATTAGCTCCCATTACAGTGACCACAGTAATAT
AGTAATCCCCTGCTGTTCTCACTCTCCACTTCCTTACACTGCGTTTTAAGTCTCTTCATATTCTTTATCACCTTGTA
TCATGCATCGGTTTTCTTAGTTGTTTATTTTATGTTGCCTTCATAAATTCCATGAGAGCTCACTGCCGTATCTTTAG
AACATGGAACAGTGCTTGGAACATAATGGGCATTCCTTAAATAGCTGTAGAATAAACTTTCAAAATCAACAATAATG
TATTTGCCAAATCCATTGGCTTCTCTGCCATTTTATCTTGTTCAATACCACTGCGATATTCCCCTTCCTTTTTTTTT
TTTTTTAAAGTCTGTAACCCTTTAGCTTCTGTAATATTCCTAGTTTTTTATTCCTCTCATGTGTCAAAATCATCAGT
TGAGGCTTATTGTTTTCTCTTTCTCACTCTGACCTCACCTTTGTTTACATCTCATCTTCTGGCTTTGGCTATCCTGT
TTTTTATCTCTGTTCCAACCTGTATTTCTAGCCCTACTACCTGGACATGACATGTGGATATCTCCGTATGACCGCAG
TTTCCATATGACTTTGCAAATTCATCCCTGCTCTCCCCTCCAAAGTCATCCCCACAATTGACTTCCTGTTCCTTCCA
ACCTATTAAGGTTCAAACCCACTTTTGCTCCTCCTTTGCAGGCTACACTTTTCCTTCTCAGTACCTCTTTTTTTTCC
AAGTTCTTAGATAAAAGTCATAGTACCTTACGTTGTAATTGCCACTGGTCTGGTCTTTCTGCCTGCTTTCCTTTCCA
TTTGTAATCACATTATCCATTCCAATCCATTTATAATACTGTGATCAGCCATAAAAATAACATTTATCATATCGTTT
GTCTCCTTAAAACCTGTAGTAGATCCCCTCTATTTACAAGATCTGGTATAAAATCACCCTTCCTGATATTCAATGCC
TGTTTTAATATAATCTCAATATTATGCGTCATAAATCCCCCTGTGTTCTTGCACTTTTTATTTCTTATACATCTCAT
CAACCATGTCTTATCAACTCTCAAAACCTGTATTGGTTTTCAGGAAAACTCATAAATTATTCTTTTGTAGACCTTTT
GTTTGTCATCTTTGAAGATCTCTCTCTGAACTACAATATTTTGTCTGTATAATCAATTTGGAAATTCATCAGGTATT
GAAATATGACATGTCTTCTATTGTCTTGAACATTAATTAAAACTTTATTTGACTTTTTATATGCTTACATCTTGTTT
CCTCACGGAGTGTTAACCTACTAGAAAGTAATAGTTTAATCTTATATTTATTTTAATTCAGATTTAGTAGCATACTT
TACACGTGGTAGGATGTGTAACTGCCTTACACCTTGCTTACGTGAGTTATTAATGTTTTCGTATATTTAATCTGAGG
ATGTACTAGCAATGTTAAAACTGTACCGCATGAAATTGAGTAATTGAACTATTTGTTTTAAATGTGTTGCTTAACTT
ATTGTACCATTTTCTCATAATCACAGCTCAAGTTAACTTTGTGGTTGTACGTATTATTTCTTGTGAAATGCCAACAA
ACTTAGAGCAAGGAAAATAACAGGTATAATCATACTATAAAGGCAACCTTAACACTAGCATAGTCTCTTAGCTCATA
TGGTAACTACAATAATGTACAGTGACAAAGAGAATATTGTACTTTCTTAGCACACACTTTCCTACTACTCTACTGTT
GTGGATAAAAACAGACATACTTTAGGAGAAACTATGTTATTTCCAAATAATGCCTTAAAGGTTACTCCAGGAAAAGG
CATTTACATAAACTATCTAGGAAAAGAACCTTTTAAATAATATAAAGAGCTCACCCAAAAGGACTGAAGTGTTTAGT
TGAAAAAAAGTAAAAATGTCGAAGACTTTGAAAAATAGTTTCTTGCAGTATATTTTCATCGCTTCCACTTACGTTAT
GAAGACATTAAGCGCTAGTTTATCAAAAACTATTTTTGTACATGTCTTCTAATGACAGAACAATGTCAACATGATTT
TCATCATTGAGAATGCGTAAAGAAACCCTTTGTACAGTTTTTTCTATGAATGTTCCCCTAAGATTAAAGCAAATTTC
CAACACGAATTAGGCACTCCGAAAGGAGGAGGGGAGGGAGGGGAGCAAGTGCTGCAAAACTTCCTGTTGGGTACTAT
GTTCACTATCTGGGTGATGGAATCAACAGAAGCCCAAACCTCAGCATCACGCAGTATACCCTTGTAACAAACCAACA
CATGTACCCCTGAGTCTACATTAAAAATAGAGATTAAAAAAAGGAAATCAGTATATAATCTAATAAATACCTCTCAA
GCTTTCTCATTTTTAAAATAAAATTTTAGATTATTATTTTAGGAATAAAATAGGCTCTTCATTGTATATAAGTTCAT
TTCTGAGTTGCAAAAATCCTCTCTTTATGTTTTTTTCCCCGTATTAGCATGTTTTTCTCCTGTTTTTCCCCACTCAA
CTTGGCTGCCACAATCAGAAAGCACAAAGACAATTTTTTCTTGCGCTTGTAAATCAAAACCTTAGCATCAGACAAAA
TAACTGCTCCAGGTCTGTCAAATAGATTCATTTGAGCTTTCTTCATGCATTGAATACGGCAGAATTTCTGACCTGAA
GAAATCTAGCCTTTTCCAAATTTGCTTTAAGAACATTTTGCAATAAATTTAATATAATAAAAGGAAAAAACACATCA
GGCTAGAATTTGGAACCGATTGTTATTAAAAATCTCAAGTCTATCAATTTAACTTCAACAAATTACTTAATTTCTGT
GATGGTTAATTTCATGTGTCAACTTGGCTGGGCCGCAGGGTACCGAGACATTTGGTCAAACATTATTCTGGGTGTGT
TTATGAGGCTGTTTCTGGAGAGATTCACATTTGAATCAGTAGAGGGAGCAAAGCCGATTGTTCTCCCTTGTGTGGGT
GGGTCTGATCCAATCAATTGAGGACCTAAGTCCAATCGATTGAAGACCTAATCAAAAAGCCTGATTAAAAGGAACTC
CTGCCTGATAGCTAAAGCTGGAACACCCATCTTTTCCTGCCTTTGAGCTTGAATTGAAACCTTGGGTCTTCTTGAGT
CTTAAGCCTCCAGTTCTGGGGCTGGAACTTAACGTCATTGGCTTTCTTGGTTCTCATGCCTTTGGACTCAGACAGGA
ACTACATCATTGGCTTTCCTGGGTCTCCAGCTTGCTGACTGTAAATCTTGGGACTTCTCCAGATTCGTAATGAGCCA
ATTTATTACAATAAGTCTCTCCCTCTCTGGTTTCGAGAGAGAGAGAGAGAGAGACAGAGAGAGAAATGAGAGCACAA
GAACGTGAGTGTGAGAGTGCCCTAATATAATTTCTCTAAATATCACTGGTTACTCTTCAAAGTTATAAAATTGGTAT
AAAAGGTGACCTCAATTTTTCATGGAGTTAATGTATGAAAGTCACAATTAAAAAGGAAGAATTAGTTCTGGTGTCCT
GAAAGTTATTTGAATAAATTAATATGCTATGGAGGCTTTAAAATACTATGAAAATTTAATATTGTATTATTCTTAGT
GTTGCTATTTTTAAATAGCACTTTTTCTTTTCCTTTTTTTTTTTTTTTTTTTTTTTTTTTGAGATGGAGTCTCACTC
TGTTGCCCAGGCTGGAGTGCAGTGGCATGATCTCGGCTCACTGCAAGCTCCACTGCCCGGGTTCACGCCATTCTCCT
GCCTCAGCCTCCCAAGTAGCTGGGACTACAGGCGGCCGCCACCACGTCCGGGTAATTTTTTGTATTTTTTTAGTAGA
GACGGAGTTTCACCGTGTTAGCCAGGTTGTTCTCGATCTCCTGACCTCATGATCCACCCACCTTGGCCTCCCAAAGT
GCTGGGATTACAGGCATGAGCCACCATGCCCGGCTTAAATAGCACTTTTTCTTGTGAGTCACTTTTTAAATATTTGT
GCAAACCTTGTTGCCATTCTACTCAAGCTAATATCCTAAACCGAGGACATTATAACATTTCAGGAGTCAAAACTTCA
GACACTTAACATAGTATCCTCAGGTTCATCCATGTTGTCATAAATGACAGGATTTTATTCTTTTATATGACTCAATA
ATATCCCATTGCATATATATGCAATATTTTCTTTATTCATCCATTATTAAACACTTAAGTTGATTCTATATCTTGGC
TATTGTGAATAATGCTGCAATAAACATGGGAATGCAGATATCTCTATGACATACTGATTTTATTTGCTTTGTCTCTG
TCCCCAGTAGTGGAATTGCTGTATCGTATGGTAGTTCTATTTTTAAGTTTTCGAGGAACCTCCATACCGTCCTCCAT
AATGGATGTACTCATTTACATTCCCACCAACAGTGCATAAGGGTTCCCTTTTCTCCATATTCTTGCCAACACTTTTT
ATCTTTTGTATTTTGATAATAGCCATTCTAACTGGAATGAGATGATATCTCATTGTGGTTTTGATTTGCATTTTCCT
GATAGTGATGTTGAACATTTTTTCATATGTTGTATTAACTAAGCCAAACACAGAAAGACAAATGCAGCTTGTTCTCA
TTCATATGCACAATCTAAAAACATCGATCTCATAGAAGCAGTAAATGGACGGTGGTCACCAAAGAATGGGGGAAGTA
GGGGAAAAGCGAGAATGGGGAGAGGATTGTCAATGGGTACAAAGTCACGATTAGAAAGGAAGAATTAGTTCTGGTGT
CCTGTTGCATAGTATGGAGACTATTGTCAACAGTAAGGTATTGCGTATCTCAAAACGGCTAGAAGAGAGGGTTTTGA
AGGTTTCTACCCCAAATAAATGGTAAATGTTTGAGGTGATATGCTAATTTTCTTGATTTGATCAAGTAAAGGTCTTA
ATTGTTTGGCAATTAAGACTCATGAATACAAATAAAGGTCTTAATTATTTGGCAAAGCATGCTGAGTTTTGTAAACA
ATTCAGTAGTGATTTTTGAGAATAGGTCAATAGCAAATATTAATTAAAATGTCTTCTATTTATGACCTACAGCTAGA
TGGTAAACAGATAGATGATAGATAGATAACTGATAGATAACTAATAGATGACAGATAAATGATAAATAGATAAATAT
AGATAATCGAGAGAGAATACCTTTCCCTTCACACACGTGCATATAGGCACACTCCATTTCTATCATAGTTACCAGGA
TTCAGACATTTTGTCTCACTATTTTTCTCAATGTGAACATGCATATAGGAATATTATAGTTTTTGTTCTGTGCCCAT
TTTAGTTCGTTTTTTAATATTTCAGGACAAAGGCAATATGGCGGTTTCACTTTGTTTTTCATTTTTGCTTATACTTT
TTAAAGCTCAGTGTAGAAAAGTTTGAAAATACACAAAAGTATTAAATTAAGACAGCTGGGCACAGTGGCTCACGCCT
GTAATCCCAGCACTTCGGGAGGCCAAGGTGGGTGGATCACGAGGTCAAGAGATCGACACCATCCTGGCCAACATGGT
GAATCCCGTCTCTACTAAAAATACAAAAATTAGCTGAGCATGGTGGTGTGTGCCTGTAGTCCCAGCTACTCGGGAGG
CTGAGGCAGGAGAATCGCTTGAACCCGGGAGGCAGAGGTTGCAGTGAGCCGGGATCACACCACTGTATTCCAGCCTG
GTGACAGAGCGAGACTCTGTCTCAGAAAAAAAACAAAACAAACAAACAAAAAAGCACCTATAGTCTTTCTCCCATAG
GTTGCCTTCTTAATGGGTTTTACACCTTTTGATGTTTTCTTGAGTTCTGTCCCATTAGCAAGTAGTATTGTACAAAA
AAAATTTTATCATCTTTTATTTAATATTTTATTGATGTTTAATAATTAGAATTATTTTAAATTTTATATGTCATTTT
AAAATGCAATACAATATAGTAAACTCCCAGATGTGATTGTAAATAATTAATTATTCTCCCATTATTGGGCATTGGGA
CTGCTTCCACATTTTGGTCACTGCAGTGAACATCCTTGTACATGAATCTGTATGTTGAAGTTGATTTCATTCCACAC
TCCCCTTCATTCAAGGGGCTCCAACCATTCTCGTTTTCTTTCAGCTTCTTTATATCCAGGCATATAAAGTTCCTTCC
TGACTCGGGAGCGTCATACATGCTGTTTTCTCCATCTGGATAAGTAGTTAATTCTGTTCTTCTTTGTGCATCTCCCG
TTTCAGTAACTTCATCTCCAAAGCCTTTCCAGGTCACTTTATCTAAAGTTACACCATAATCTTGCAAATCCTCAACT
ATTGAGCATTATTAGTCTCCGTTATCATTATTCTCCATTATTCTCTGTGAAAGCATCCCGTGATTTTCTTTTGTCCC
TATTACCACAATATGTGTTTATTCCGTGTATGTACATCTTTGTTTGTTTATTGTTTGTCTATACCTGCAATGAAATG
CCTAAGGTCAGGAACTGTCTGATGCAGGATGCAATGCGCTCAATAAATATTTACTGAACAAATTAATTCATTTGCTC
AGTCTTGCAGGCAAATGGTACTTCTGTATATTTAAATATCTAAAATGAAAGCGTTACTCGTTACTGTTGGTTGTCAA
TCAAAATTTAAATGTCGATGTTTAAGCGTGAAAGACCTCTGTCAAGTTAATCTGTACTTACCCAAAGGCTATTATGT
AGAAGCGACATAAATATTTTCCTAAATGTTGATTTTCATATTTTAAGAAGACAATGAATGTTTCAAAGCATTTTCTT
CTACACAGCTATTTATTCTGGAGAGTGGGGCATATGTTTCTTAATATTGTTAAAATTGGCAAGGGGATACTGTTGCT
ATATACAAAGAACACCTAATCATCATGCAGACGTTTTGTTTCTGGCTCTCAGTTATGAAAAGCAGAGATTTTAAAAA
GTTACCTTTATATGCTAAATTAGGAATGGCAGAAGGTAATATTCTAATGTTTATAAGTGGTTCTTCTCTGAGTCCTT
GGTTTCTATGTTTATGAATTCTCTTTTTGAAAGAAATTATAGTTATTATTACCAGGTCTATTCTTTTACATTGTTTC
TAATTCTATGGTGATCTTCAAAATAGAGTATCAATTTTAAATACTTGGGAATGAAATTATTCTTCCCATATCATTTC
TTTGTATGGCATACATTGTGATTTGTTGTCCCATCATTGTTTCAGTATGACCTGTTACTGCAAAAACATATTGAGAT
AAATCATCCCACATACTCTCGGCCAGGACAGACATCACACTGTTGCAGCAACACTTCAGATGAGCCCCATTCAACCT
TGTGTTTTTATAGAGAAGGATGCCACATGTTTATATTCATTTCTGAAGATTGGCTCATATTATTTATTGAAACATAC
TAGTTTAAAAATCTGTCCATTTATATAACACCTGGTCTATCTACATAACTTGAATTACATAAATATAAAACTAAACT
TCCCCTCTTCTCCAGTGTATAGCTTGCAAGCAAGTGCATGTGAAATAAATTAAAGCCTTGTTTGTGTTTTTTTCATC
ATGTGAGTACAAGACTTTTCAATAAAAATGAATTACTTTTGAACATATTTGTTTGGACAACAAACAAGAGAAAAGAT
CTATTTGATTGATAGTGGACAGAATTTTCATTAAGTTCAACAGCAGAAATACCACAATTGCATCATTCACCTTCGTG
TATCAAAAGAAAACAGAAAATTAGATGTGATGAACTCTACACAAATGTTCACTATGCATACTTTACCCATTAAATAC
ATTATCAAGAATCATGTCAGCATGACATTCTAATATAGCAGCTTTACAAAAACATGTAATCTAATCTAGGGATGCTG
TTGTCCTCTTTAAATCAGCTTCAAACATATTCTGGGTTGATATTTCTCATTCTTTTTTGATCCACATTGTTTATTCA
CATAATGATTATATTTAACTGAAGATAACAGCATTATCAAAGTGAAAGACAAAATAGATGTTTAATAGGAAAGTGAG
TATCGAATCATCTTTTTTCTACCAAAAACATCTATAATTATGAAGTATTTGGTTAATTATTTTCACAATAATTTAAA
AGTGTACAACTTGCCGATTTTTTTGTACTTTCTACTTTTCATGTCTCGCATATATCTCTTTAATATCTAAGTATTTG
AGTCAGAAAAGAGCCAGTACCGAATAATGGGAATCTCACTGAAATGTGATAACAATCTGGGGCCTGGTCCTGGGACC
TTTATCTGCAGGACAACTTGGACAAATATTTAGACCCCCAATTCCTCGTCTTTACCCTAGGAATAATAACACATTTT
TCTGACCTCATACTTCACGTGGATCTCAAATGGAACAATCATCTGATAGCACTTTATGAAGTATATGAAAGCAATAA
ATTATCACAATAAGATAATTGCAATTATTCTTTGGCATAGTATTAGTGATGTCTTTATCTGTCTGACAAAATCAACA
TTTCTGTATGGTAACTGCCTTTCCTTGTTTTAACAGAAGATCATGCCAGAAAAGATGAGTAGGTAGATACTTAACTT
GTTGTTCCTGAATCTGGAATGTATTGCAGATGTCCCAGACTGATCTTTGTTCTTTTTTTTCCTTACAAATTTCTTTT
CACATTGACAGTGTGATATTTCTTTAAATGTGCAATACATAGCTAACCTTATTTGTTTGTGTTTACTAATTAAAATA
TCTAAACTGCTTAAAGGAGAAAATTCAGTTTTAAGTTTTATTGATTTATACCCTTCTTCAATCCACATAGGATTAGG
GTAGTATGTAACAAAATTTCAAACTATAAATGAAATATTGAGTTTTGTATTAAGGCCAAGGATGAGGAAAAAAAAAG
TAAGTATATATGGAAAAAGAATGGTATTGAATGGGAGTTTTGATGGAGCATGTTGACATCATGATAATACCTATTAT
CTTTATATTCTGAATGTCAGAACAAAATTAGAGCAATTTTCCCTTATTTCCCTACAATACGTCTGTCTTAATAATTC
TAAGCTTTCCTGATTTCAGTAGTAATCTGTATTTTGCAAAAGGCAGCATGTTTATAAGATATCAAGTAAACTAAGTT
TATGGAACTTGTAACAGCATTTTTAACAACATTTCTCCCTAGATAGTTCATGGTAGACATGAATTTATTCAAAACTA
GTATGTAGAAAAATACCATTAACAAAAGCTCTGAAATTATATTAGAGGAGCTGAATAATGTTACTTGAGAAAGAATA
AAATGTTATTTATGATTTTTGGTATCTTTTACCCACTATATATGGCCATATCTCTGAAAAACTTTAGTAATATGTAC
TAATGCAAATATGGTAGTAAATTATGTCTACAGGTGCTGATACCATAGTAGATAAAGTATGATAACTTTATTTTAAA
ATATCATATTTAAATAATTAATATACAGTACTGGGAAAGACTATTTTATCTATTCTCTCACTCTTGAATAAAAAAAT
CCAGAAAAAAATACCTTGTTTTGGTAAGATTATATCAATTTATTTCCCAAATGGGTAGAGGGTTATTTTTTTCTGAT
CATAAACGTATGTCTCTTCATTATAAAAATCCACTAAAAGTGATAGAAGAAAACCAAAAGAATAAATGTAAACAATG
ATGCCATTTTCCAAAAATCACCTTCGACATTTTTCTGGATATTGATACAGTCTAAATCTCTTTTCGGAAGACTCCCT
CCTGTGTAGGTTCCCCAACTACTCTGCAATCTTATTTCCTCTTGTTCTGTTCTTGTAGAAAGGAGACCCATTGTCAC
CATGTCAAATAACACAAAATGGTGCACGTATAAGATCATTGTCTCTGTCCATTATTTGCCAGAGGACCTCAAACTTT
TTCAGGTGGTGGGCAACTGGATGTCATGCTGCTCCTTGTACAACAGAACACAATTCATTATTTATATGGTTATTTCA
TTTTAAGAAAATTTAACTTTCATTAGCTGGAAAAAAAAAGAAGTGGTTTTTAAGTTGTTTAGAAATGTGAAATTCAA
TTTTCATACTGCAAAAGAGATTCAACTGCAAACACAGGCACACATGTCTGGTGTAAGAACGAGTTGTCATACAAACC
CAAATTAGCTGCCTCCACGTTGTCTTTGTTAACAAGTGTTTGTTTGCTCCTTGTTCCATCATTCAGAAATGCTCTTT
AGCAGGAATTGATGGAACACAGTCGCAGTGACCTCTTCCTGTCTTTAAAAATCGAGATGACATTTGCCCATCTGCAG
TGTTAACATAGTTCCTCAAAGACCACTGACAGTGGGGTAGGACTGTATTGCGCAAGTTCTCTCATTTCCCTAGAATA
TAATTGGTCCAGGGCCAGAGATTTTAGCTCATTTAGAGCAGCAAGGTGCTCTTTTAAAATTCCCTCACCTATTTTGG
GCTTCATTTCCCTTATACGGTTATGCCTTTTCCAGTCTGATGAACATTCTCCTTGACAGAGCAGACAAGCAAAAGGA
GCTGCACACTGCTGCTTTCTGTGTCGTCTCTATCCCTAACCTTCTCCCTTCTGCCCCAATCAGTGAACCTTCGTCTT
TCTGGTTCTTCTTCCTCCAAATGGAAGTAAAAAGGCCCTGAATGTTGTCTTTACCATTATCACGAGCCTCAATTCAT
TCCAAGCTCAGCTTTTCCTCACTGTTTATACAGTTCTATATTGTTCTTCTAATATTTGCCCTCAGTTCTCTGTCCCT
CGTTTCTTCCCATGTTCATACTCTATTAGAATCTGAGCACCTTTGAGGTTGTCCATACAGTGGCACACATCTTTGTT
TTATACTCACTGGGATGATTTGCCATTATATTGTCAAAATTTTATTCTAAAGAGCTTTTACAGGCTTTCTTGAGCCA
TTTTCTCTTGAAATTCAAGATCGTTGAATCTCTACGCTTTTTCCTTCTTAATCTAATAAACATACACCCCCACATAC
ACACGTGTGTTCCTGAAAGACAGATGCCACTTGACTCGTCTTATAGATTGTCTAAATTGATCATTGTGTGTGGGGAT
AAAAGGGTGAATTGTATAATATCCCTGATGGTTCACGAAGTCTGTTCCTGTATAACCTGATTAGTCTTCTGAACTCT
TTTAAATTCTGTCTGCAAATGACTGAGGTTTGGCAATCAGCCTATTTCAGTTAGTTGTTTTCTTGCATAAGAAGGGT
CCATATGTACTGTGTGAAGTAAGAGAGAGAAAGTACTTAGATTTGCTGGATGCCCTGATTGTTAGCATGGCTAAGGT
ATTGTGTAAGTAAGGAGAGCAGTTAAAAATGATATTGTTTTTATTTCTTAATTGAGGTAAAATTTTATATAAGATGA
AACAGACTTATTTGGGAGAGGAGGAAGAGTTTGTTCTTACATAACATTTCAACCTGTCATATTTAGTTGAGAACTTC
AATCTGTCAAGATACTTTGTATAATATTCAGATTCTGCCATCTAATATATTTTCCACGCTTTCTTACTGGGTGTGAC
AGTAACTTATACTGTGGCAGGTGTATAAGTTAGTAAAGATATTAAATGCTCAATCTGTTAACTTTTGTGAAGTGGTC
CCACTGATAAAGTGACACCTCAATAAAATAAAAATTTCCATTACCTCAGAAAGCTTTTTCATGCTACCTTCCAGTCA
ATTCCCAGCCCCAATAGGCACCTATTCTTCTGATTTATATCACCATAGATTAGTTTTGTCTTTTTAAAAATTTGTAT
AAATGAAATCATACAAAATGTACTATTTTGATCAGCATACTACTTTTGAGATTCATCCATGTAAGTGTATCAGCTGT
TCATTCCTTTATTGATGATTAATATTCTATTGTATAGATATACCACAATTTATTTATCTATTCTCCTTTTGATGGAC
ATTCAGGTGGTTTTCAGTTTTTGGCTGTTATGAATAAGATGCTGTGGACATTTGTGTACAAGCCATTTGTGAGCATA
TGTTTTCATTTAGTTTGAGTAACTCTGTAGAAGTGGAATGGCTGGGTGAAATGTTTAAATTTATGAGATATTGTCAA
ACAGCACCTAAACAGTTTTCTAAAGTGGTTGTGCCATTTTGCAATGCCACCAGTGATGATGGAGAGTTCCAGTTACT
CTACATCTTTGTCAATATTTGGTCTTGTCAGTCATTTTAATTTTTGCTATCTTACAGAATATGTAGGTATATTGTTG
TGGTTTTAACTTATATTCCTCTGATTACTAGCACTATTAAGCATCTTTTCATGGATTTATTGGACATTCATATAGAT
TATGTGTGTTGAAGATTATTACCTTTATGATTATTGGGTGAAAATAGTATCATTTTGAGGTCATTCATATAACTTGA
AGACTGGGAATGACAGACATTTTCCTGTTTTGTTTCTTTTCTTTTTACTTTATCTGAAGAGTCTACTAGAATGCAGT
GTTGCTGCCTGAGCAGCAGGGCATTAGCTTTGTAAAAGCTCTGTTCCTTGGCAACCCCACCACTAATATGAAGTGCA
GAACATTTGAATTGTCTTTGACCAGCTTCAGCATCAGCACTATTTTTTTTTTTTGCTAGACCCCTAGTAGGTATTTA
AAAGTACAGAAATAGAATTTAATCATGCTTTTTACCAAATGTGCTATGCTCTTAGAGATTCTTTCAACGTGCATAAA
AATTCTGCAGTTTCACCACATACCAGTAAAAGAAACTCAGTCACTCATTTAGCCATTTAGTAAAAAGAACAAATTAA
CTGATGAGCATAGTGGAGACCTCAAAGGTAAAGAAGACAATGTCCCTGAAATAAAGACAATCATAAATTTTCAATCA
AAATAATGAAATTTAGGCTGGGCATGGTGGCTCATGCCTATGATCCTAGCACTTTGGAAGGCTAAGGTGGGAGGATT
GTTTGAGGCCAGGAGTTCAAGACCAGCCTCAGCAAAAAAGTGAGACCCTGTCTCCACAAAAAAATTTTAAAAATTAT
CTGGGTGTGGTGGTATGCACCGGTGGTCTCAGCTACTCAAGAGGCTGAGGTGGAGGATCACCAGAGCTCAGGGGTTG
GAGACTACAGTGAGCTATGATTGTACCACTGCACTCAAACTTGCATGACAGAATGAGTCCTTGTCTCTAATAATAAC
AAAATTTAATTTTTATAGACTGTGAAAAACCATTATGTAGATACAGTTCAAGTACAGTATGATTTTATAGGATAGAT
AACTTTTGCTTGAAAATGTATTCCCAATTTATAGGATAGATAACTTTTGCTTGAAAATGTATTCACAATAGAGTTAG
TATTTGGGGCACACCTTTATCCATTTAACAAACATGTTTTGAGCACTGCCAGGTAGCAACACGTTACTAGGCACTAG
AGTGAGAAAAGATTACAGTTCCTGCTCTCATGGATCTCATGGTCTAGTCAACTGGAATGAAAGGATTACATAAGTAG
AGGTAAAGACACACATGATGGAGGATGGAGAATAGTCAAAGGTCTGGAGAATGACCAGGACGTCACTGTGAGTTGTC
TAATTGCACTGAAGCATGGATGAAGAATTGGAAAGTCATTGTAAGAAGCCTAAAAAGGTATCTCTCAGGGATGCTAT
GAGGTTCTGAATGTTATGTACGCTATTTGGGCTTCAACAGGCAGGCACTGAGTATTCAGTATAAATTTTTGAGCAGG
GAATCCACCAGAAGAACTATGCATCTGGAGGATTAATCTGGAAAGATTGTGTAGAATGTTATGCAGTGAAAGAGTCT
GAGATGAAACAGTTAGGAGGGTGTATTAATAACATAGGTGAAGTGTAATGAATAACCAGGCTGGAGGAAAAGCAATA
ACGATGGAATCAACCGGGCAAGAAGTATAACAATTAGGATCAGTAAAATAGAATTTGGATTGGAGGAATGAAAAAAA
AAGGGACAAAACAAAGTTGAACTGCTGGTATCCATACTGGAAAATACAGATGTCATTCAAATAAATAATGTAATGAA
TATAAGAAACCAGTTTTAGGAGTGAAGTGGATGTTGGCTTGAAAATATTTCCTTTGAGGTTTCAGTCAAATGAAAAG
GTCCTGAAATGCTACGTGGTAGCCTAAGAAGGAAGCGTTCCTAGAGAGAAAAAAATTAGAAAAGATTTACATTTGAT
AATTTAATCTTTTCCTTCATACAAGCTAAATTGATAAGAAAGTAAAACCTATAGTTTTCACCACTCTTTTACAAATA
TCCCTAACCTTTTAGATATTCACATGAATAATTGAGAAAAATCTAACAGATGACTTGCTTATGTCATTTGTCTGCTT
TATCCTTAGGTTCCTCTGGCTTATATATTGTTCAATAAAATACAGATCATTGATATTGTACAATGTACTGATAATGG
GGAGTGAATCCATGCTTGTGCATTCTTTTTTTTTTTTTTTTTTGATTTGCAGAGGGCGTGCCCAGTCAACAAGAGAG
GCACAATTGTTTTTATCATCACCTCTTCTCATCTAATTCCATGAAGGAGAGTAGTATTACCATACAACAGATAATGA
GTTGGAAAACAAGAAACCTAACCTCAGAACTTAAGGCTTGGGGAAAAATAAAAGAGTAATTTGTGTTTAATGCCTGT
ATAACTTGGCAAGAGGGACATATAAGGCTTAGTGATGCCCAACATGTGCTTAGATGTGGATTGTTAGTTGATGTCTT
GGGGGTTCTGTAATCTAAGCTAAATGCTCAAAATCAATTAATTGATGTTAGACACAGAGATCTGCTTTGATCCCTCT
TTATCGTATTTCTAGGCCTTCCCATTCTCAAGAGCCTGAGAAACGACAGCTTTCCTTAATAACTTGTTATTTGTGGT
AGGAGATGAAACTTTGATAAAAACACAATTATTTTTAAATGTCTCTTTTTCACTCTAGGCTGTTGTATGTATTTCAA
AAAGTTACTTTTGACCCTTTCCAGAATGAGAAAGCAATCAAGAAGATTATAATATCTTGCTTAGTTTTCTGCTCAAT
TTATCAACAAATATTTCTTAAGCAATTATTAAGCTGAGCAGTGCTCAGCGCTGTACTTGGTGATATAGGAAATGGGG
AAAAGACTGTCTTTAAGGCCTTTATAATAGTAATTACCTCAACTTGTCTGTTTCTTTTCCTTACCATTTCGCCAAAT
TCATTGATCTATCTTGTTCTCAAAGCAATCGCCATAGTTATATTGTAACACAGCATTTTCTAGGGTGTCCCCATTAA
GTTGAGAGTGTTGACAAGAAAATACAAGCTTATTTATCATTGTAAAACTTGAGACACCTAGTAGTTACCCTAAATTA
AATATTTGTTGGAGTCAGTCACACTAAAGAGAACACTTACTGCATTGAACAATTTACCTACATTAGACAGCATTTAA
AGACTATGCCACAGCAAAGGCCCATGGAATTCTTGTGAACACAGAATAGAAGTGTATTAAGGAACAAGCTTAATTCT
GTTCTCTTAAAGCACAACACTTTCTCAAAACATATTTTGAAATCACCTTTGACCATTTTTTTTAACTAATAGGTGGG
TGGGAGTTAGGGTAGGAAAACACAAGCAGCTTCATCAAAACGATATTCTATTTTCTTCAAATTTGTGGGGAATCATA
CGGCCTCTCAATTTTCTACATTATGCTAATTATGATATTAATCTCTCTGCCAGCAAATGAAAATAATACATATTAGA
TGTAGCAAATGTCAATAATGACAAAATTAGTCATCATGCAGATACTCAGGGATTCCCAAAATATGTTTGGATTATGA
TTGCTAGCTTTGAGTTTGCCCAGAATCGTTTCAATAAAAATAAGGGACTCAAACACATTTGGAGCAAAACTCACATC
ATAAATTTTAGACATAGCTCTGCCAATAATGCTCTCAGTTATATTTTCAGTCCTAATATTTCCTCTGAGTTCCAGAC
CAGTATCTTCAACTGTCTGATTGATACTCTCTCCTTCATTTCTGTCTCCAATGCATTAAGTCCTGTGTATTTACTTT
CCAAATGCCACTTGGTTCCATGCACTTCTCTCCATTTCTGCCACTGACTCCTCCTCAATCCAAGCGACCATCTTTCC
TCACTTTAACTACCATGATATCTCCTGCTTGGTCTCCTTACTTCTATTCCCGGGCTCCTCCAATCCATTCATCCTCC
AGCAGAGAATGATGACTAGCACCTTCCACAGTGTCTGGCTAATAGGAGGTATCCAATCAATAATTGACTTACAGAGT
GAAAATATAGGCATGGCAAATACCAGTAGAGAACTACAGGGTTTTAGAACCAATGACATTAGATACTTCCATCAAAT
ATTTACAGTGTATAATCAAGTTGACTTGCACATTGTCTTATTTTTGAAAAACAATTTTGTTGGCTTTTTCTATATGC
ACACATACATATTGTATCACCCTCTACCCGCCAAATGGCTTTTGAAGAAGTATTTATGTGGCTCCAAATTGATAATA
CCTCTAGAGAGAAGAGAAATTAGAAATTTTAAAATGACCTATGCTTCCTTTCGAATATCACGTCCTGAGACAGTGTT
TTTTGAGTTACGTGCAATATGTTCCACGATGAAACATTTAATGTGTTCAGAGGCATGCTAGTAATCATGTAGAAAGA
ATTTTATGCCTGAAGTCACATGTTCTATAACCAGGATCACTTAATAAGAAAACAAGTACAGCTGTGGACAAGATGCC
TTTTTATCAGGGAAAGGCCAATTTGTTTTCTTTGCAAATCTAAGTAAATGGAGAGAAAAACACAGCCCTTAAATGTT
TTCTATTTGTCCTGAAGTTCTCATGAATGAGTTAGAAGGCGAGAAGGATTAAATAAATCCTTGAACGTAGAGAGAGC
TAACATTTATTTTAGCAAACTAAAACCTATTCGCTTTGCAAAGTTCTGTTCTGTACTTTGTAACAACAGTTTTCTTT
AAAACAAGAGCCACCAATTCAAATGCCTTTACAGAATGATTGAATGCTTTCATGCCCCACCTAAAGGCATTCAAATC
ATTAATCAAACAAAGTTCTAACGCCAAAACATGTCTGGGACCAGATTTAAAATGTAGCCCTCAGTTTCAGAGGGCAA
AAACTTAACATATTTATATTTTCCTCACTTTAGGTAACACTGTATTGAATCTCTGCTTGAAATTGAGGAGCACGTGA
TTTTTTCTTTTTGGCCCAGGGCAGCATTTCTTGGAAGAGAAAGAAAAACAACCCAAGATACCCTTACAAAACATGTA
GTACTTAAAGCTCTTTATGATGAATTAATTTTGGTATACACATTAATAGCAGTGATAATAACAAATCTATATATATA
TATATAATTGATATGAATAAGATAAATACATCAAAAGGAAATTTCATTACAATTTGATATTAGGTAAATGTCCCATT
AAAATAAATTGCTACTGTACATAATTTTCCTTCAGTTCATTGGCAGGATGTTTGCTTTGGAAAATAAACAGTCTATT
TCTAGTTTTAGAAGGAATTCTCATTATTCTTTTATAGCAACCATTATCAGGAGCAGATGGGAAATTGTACCAAGAGC
ATATCTACTATTATACCTCACAGGAAAAAGAGAGTATTAAATGAAATCTAACAAGGCCTGCTCCTGACTCTAGTTCC
TGTAACAAATGAACACACACATTTGTATGGTTTCAGCATTTGTATTAGTAAGGTACAATAAATGTTTACTGAAATTG
AAAAAAAAAAAGATAACAGGAGAAAGAAGAGGCTAAAAAGGTGCATTTTATTTCTGATCGTTCATTGTAAAGACTGC
TCCTTTTTAAAATAATCAAATTTTATTTTATATACAGAGGGTACATGTACAGGCTTGTCACAGGGGAATAGCGCATG
ATGCTGAGGTTTGGGGTACAGATCTCATCACCCAAACAGTGAGCATAGTACCTACCTGATGAGTAGTTTTTCAACCA
ATGCGCACCCTCCCTCCTTCCCACATCTACTAGTCCGCGGTATCTGTTGTTCGCATATTTACGTCCATATATGCTCT
ATGTTTAGCTCCCACTTATAAGTGAGAACATATAGTGTTTGTTTTTCCTGTTCCTGCGTTAATTTGCTTATGATTAT
GGCCTCCAACTGCATCCGTGCTTCCGCAAAGGACATGATTTCATTCTTTTTATGACTATGTAGTATTTCATGGTGTA
TATGTACCACATTTTCTTTATCCAATCTACCATTGTTTCACAACTAGATGGATTCCATGTCTTTGCTATTGTGAATA
GCACAAGACAGGACCTTTTTATTTGACTGAGTTCCTTGCAAATTACTAATAAAAGATCTGGAGGTCCTTAGTTAAAA
GTTGAATCTGTAGTGCCGTTCAAATTTAGAGATGTATTTTCTGTTCAAGAGAAGAAAGCCCTCATTCGGTCATGCTT
AATATTCAGCTGTAAAGTCCAAAACATATGAGAATGACACAAATGGAAACATTTTATAAATACCTATACAAAGGAGG
GGCACTTAGTTCCCCTAGGCCTCTTAAAAGTCCTCTAGAAAGAGGGTACTTTTATGCTAACTATTAAAGATGAGTAA
CGAATTTGTCCTATACAACTTAACAGTATCGTCAAGGAAGTAGAAAGTTACTCAGTTTTACTGGGCATTGGAGCTAA
GCTTGAAAGTGAGGAGGAGAAGCGGCAGGAGACGGAGCCGAGAAGGCAGTGGGGAGAAGAGGAGGATGGTCCTTTCC
ATGCTCCCTGTTGTACTAACATGTTTGGATATTATCTTATACTTCATATATGGACTGGATTCTTGTCCTTCTCATTC
TGAGCTCTCCTTGACCTTGATTCTTACCTCCTATAACTTTCATTCTTTCTTTACTCAAAAAAAGGCCATTTATTTCA
GCCATTTTTCACTGTTTTCTTATCCTTCCTAGTTGCTTTTCTATACTATTTTTCCACTCTTTTTTTTTTCTATACTA
TTTTGCCCTTCTCTCCATTTTCCTAACTGCTAGATTTCCCCAATTTTAGCCATCTTTCAATTGTTCTGACTATCCTC
AGGTGCTCCCACAAGGTTATCAGACCTTCCACCAAGACGGAATCCCTCAGTCTATGGACAGGCTAAGTTGAATGGGT
CCTGGTGCTGTGCTTAGCATATGCCTTGAGTATTTGTGCATTTATTTTGCTTCTTTACAAAAATCCATCATCCGATA
GAAGTTGAAAGAAACTTGCTGAAGCACATTAAAATCTCTGAAAACAGTATTGGCTATATTTTCTAATAATTAGCATG
ACTGGTTAACTTGCTTTATTTATCATTGAAAAAAGTATCAGAAACTGTATATCAAACTCCTGAATTCTTGGCACTGA
CGAAGAGACACAATGAGAATGACCTTAGGATAAAAAAACAAGATAAAGCACCATATTTGTAGGAAATTGCACCATAA
AAGTCTGTTTCACAACTCTCCCAAATTTCATTTTATTACATCTTTTCTCTTGACCAATCAGTAAACTCGGTTAATGA
TTTACCTGTCTCAAAATAATTCATGAACAAAATTACAAGTAAATCTCAGTATTGGATTCTTGAAACATCTCCTTGTT
CAATGAAGTTTCCTTTTTCTTCCCTCTATTTCCCTGTATTTATCTTTTCTTCCAGTTGCATTTTATCTCTTCTGTTT
TTTTATCTTGCTCCCTAGTTTGTGATTTTTTGCCAATTTTTTATTTCCTACATAATTCATCCAATCTGTCATTGTAC
AATTTCTTATAACTGCTTCTTAGCTTATTCCTTTTCTTCATTTGTCACATTCTATTTTTCATCTATTGTGTTTTCAT
GCAGTTTTGGAAAGTTTTACAAATAGACTTTTAAAAAAATGTACGTAATGTTTTCATAGAAAAGGTAGTGGTTTCTT
TTTCTTATATCCTTCCCTGTATAAAAATAAAAATGTAGCAGTTCTTTCTTTGCCTATGTTTCCTCTTTCCTTCCCCC
AATTTGACCAGACTTGAAGGACTTAGATATGTAACAGTGTTATTTTCTATAATTTAGGAACAGCTTTTGACTTAAAA
AGCAGAAGAGAAGTTGAAAATAATATAGTAATTCTACATGTCCTTCCTGCTTCCCAACTCTCTGCACATGTTTGTAA
CCTCCCCTTTCTTTTTTAGTGTATCTCTTTCATATACCTTTGTCCCCAGAAATTCTGATTCAGTAGACTTAGAATGG
AATTCTGGGCTTTTATATTTTGAAAAGCTCCCCACGGGAGTTAGATATGCACTTCTTATTAAGAATGAATGCTTAAT
ATTGGAATCAAAACACAATAAGCTTTCTAACTATGATGAATAATCCAACAGATTTAATTATGATTTTCTTTTTGTCC
AGAACCAAGACTAGATGTTAATTGCCAGAGAAATAGATAAGAATGCCTATGACAGCAGTACATTAATATGATATCAA
AGCTTGGAAATTTTATTGGTAATGAATAATTCAGTACTTAAAATATTTAGAAGCTATAGAATTAAAATTAATTAATG
TTGTTCACTGTGTGAATAAAGTTGATTGAGATTTTACATTTAATTTTGTAAACCCAGTGTTATCTTTTCCAGCTCAG
AAAACACCACATACAAGCTACTACTTTCTGTTTTGATCCCTTATTTTTCTTTCTTATGCTTTATCACTGAAAACTCT
CCTTGAGCAGGCCATGCACTGTAAATATTTCTCCTGGTTGCAAAACCTTCTCATACAAATGCAGTAGACTGTGTAAT
GAGCTCTTCTTTCACAAAATTAAAAAAACCTGAAAGCCCTGATTTGCGATTCTATACAAATGAGATTTAGATCTAAC
AATTTTAAATTATTGCTTCACTCTTAGCTGTTCAATTCTATCTCTTATTTGGGAAACCGAAATAATAAAACCATTGC
TGATTCCACAATTAGGTTGTAAAAGTCACCGTAGCCATCAGCCATGAAGCAAAAGTGCCAAGATCAAAACTACAAAG
CAAAGAGGCTGAGATAAAAATGCTGCAGCATTAGTTTATAGCATTATAAGCAGCAATAAGAATTCCTTGATTGCTTA
ACAAAGACTCAAAAGGCATTTACTCCATTACCTTACAACTCAAAGAGGTATTCCTGGACCAGCAGTATTGGCATTTT
TTTGAAGTTTGTAGGAAATGCAGAATTTTGGTGCCTCCACGGACCTAATGCAGCAGAACTTGCAGTTTAGTAAGATC
TCCAGGAGATTTGTATGCGCATTAAAGTCTAGGAAGCACCGCTATGGTATACATCTGATGTGTGCCCATGCATTTTT
TAAAAGTATGAAGTAATAGTTGTAAGTATTGGACACTCTTGAAGGAACAAATAAGAGCCATGGTCTTTACTCTCTAA
ATACCTCCCTGACATCTATGTTTTAGGCAAAATTTTTTTCCCATTTCAGTAGTCACTGATGCTTGCACGATGCAGTT
TATTCCAAAACAATGGTGATTCTCATGTAATAGTTCATGTTGCCTTAATAATTTACGTTGCCTCAAGTTCTCTGCCC
AGGCCCCAATATACACCGAGGGCTGTACTCCTCCCCTAACGCCTGCTCTCATACAGTGGCATAGAGCCCAGTTTTAT
GCTCTTGGTCACATCATGGAGATTGCACACCACAGGCTTTAACTTCTGCCGTACTCTCACTGCCTCTAACCCTCCAT
ATGCCTAAGTTCTACGATTCTTTAAATTCCAAATTGACCCAGAAGTCTCCTCCGCTCATCCTTTTCACTGAGATCAT
CCCTCTTCTGGCCTACCATTTGTTGATCACCTTGCTTTTTTTTTATCCTACTGTATGTAGTATAACAAATTATCACT
TGCAACTGTGTCTTATTTTTTCAACTAGATTATGTACTGCCTAAGACCTAGAAAATTGTGCTTATTTATTTGAATCT
CTAGGAGGATCAGTAATGGGTATTAATACTAATGACTCCATGGTGATGATGAGCCTGAACTTCCTCCCTTCCTTTCT
TTCTACCTCTCTCCTTTCCTCCCTTCTTTTCTTCCTCCATTCCTTCCTCTCTTCCTCCCTCCGCTTCTTCCCCACTT
CCCTTATTCATAGATTCATGCGTTCACTCAGCAAATGCTTACTGAAACCTTCCATGCATCAGACATTGTACTAAACA
ATAGGAAACTATCATGAATAAGACACAATATCTGACCTCAAAGAATTTATGATATAAAAGTAATGGCATAAACCGTG
ATTACTTTTGCACCAACCTAATATATAGACACAGTTTGTTATGACTGGTGTCTCTATTACTAAGCAATGACTGTCAC
ATGCAACGCTGATCTGAACAGGTGGTAAAGAGTGAGATGTAAGCAATGGAGCAAAGCCAACTAGTTACAAGGAAATA
TCACATGTTTACTAGAGCACATCTCATGGGCATTCAAGAGAGTATGGCCAGGACAGCTTGTGAATAGTTCAGTAACT
GTGCATAGTTTTATATTCATTGTGAGGCACCGTGTCACCGGTTTGCTGATTTACAGAGTATTTTAATTGCTAACTGT
ATGCTACCAAAATTTCCAGTATTCGAAAATAATTTTGCTTGAATGTAGAAAAAGAAAAAAGCCAAGAAATGTATGTG
AAACGAGAGTCTAAGGGAGCTTTACCTCAGTCTCAGAAAACATGCATTCCTTCCTTCATTTAGGAAGCATGTACTGG
GGTCTACTGTCAGCTTGCTATTGTGTCAAGGAGTAGGAGAATACAAAAATATTAGAGAATATGAATCACATCTATTA
GGAGAGTTTTCTACATACGCACATTATTCTGTCAGTGACATAAGGATTTGAGTCATTCAGATTTAAATACGGTAGGT
ACCTCAAGTTCTCAGATATTATTTCATTTTCTAAGGTTCGTATTTAGTTAATATGTTATTTTAATGGCCTTACAAAT
TCTAGATTATCTTTTTTAAAAAGTTAAATAGAACGTAATTGCCATTTTTATTTAATGGTAAAAAGCATTTTTGTTTT
TGTGTGTACTTGGTTGTAATATTCTCCTTTTCAATTGAGCTATTTTTCTGATACTTTACTCTTAAAATTTCATTCAG
GAAAAAAGTAAACAATATTTAAGCTTGACAATCATAAAAATGCTCTGGTGACTATAGATTATTTTAAAATTTATTAC
TGTAGCTTAGGGATATCTTGATGGGATGCTCCTGAAAGCAATTAATTCTCAGTTTTTTGTGGCTTCTAATGCAAAAT
ACATTGACGCAGACAGAATTTGAAATGAATTTTCTTCTAATATAGCAATTAATTTTATTTAAATATCTCTAGAGTTT
TTTTTTAATACTGTGACTAACCTATGTTTGTTCTTTTTCACCTCTCGTATCCACGATCACTAAGAAACCCAAATACT
TTGTTCATGTTTAAATTTTACAACATTTCATAGACTATTAAACATGGAACATCCTTGTGGGGACAAGAAATCGAATT
TGCTCTTGAAAAGGTTTCCAACTAATTGATTTGTAGGACATTATAACATCCTCTAGCTGACAAGCTTACAAAAATAA
AAACTGGAGCTAACCGAGAGGGTGCTTTTTTCCCTGACACATAAAAGGTGTCTTTCTGTCTTGTATCCTTTGGATAT
GGGCATGTCAGTTTCATAGGGAAATTTTCACATGGAGCTTTTGTATTTCTTTCTTTGCCAGTACAACTGCATGTGGT
AGCACACTGTTTAATCTTTTCTCAAATAAAAAGACATGGGGCTTCATTTTTGTTTTGCCTTTTTGGTATCTTACAG
(SEQ ID NO: 958)
Homo sapiens dystrophin (DMD), intron 44 target sequence 1 (nucleotide
positions 1127695-1127744 of NCBI Reference Sequence: NG_012232.1)
GTAAGTCTTTGATTTGTTTTTTCGAAATTGTATTTATCTTCAGCACATCT (SEQ ID NO: 959)
Homo sapiens dystrophin (DMD), intron 44 target sequence 2 (nucleotide
positions 1375846-1376095 of NCBI Reference Sequence: NG_012232.1)
TGACAAGCTTACAAAAATAAAAACTGGAGCTAACCGAGAGGGTGCTTTTTTCCCTGACACATAAAAGGTGTCTTTCT
GTCTTGTATCCTTTGGATATGGGCATGTCAGTTTCATAGGGAAATTTTCACATGGAGCTTTTGTATTTCTTTCTTTG
CCAGTACAACTGCATGTGGTAGCACACTGTTTAATCTTTTCTCAAATAAAAAGACATGGGGCTTCATTTTTGTTTTG
CCTTTTTGGTATCTTACAG (SEQ ID NO: 960)
Homo sapiens dystrophin (DMD), intron 44 target sequence 3 (nucleotide
positions 1375985-1376035 of NCBI Reference Sequence: NG_012232.1)
GTATTTCTTTCTTTGCCAGTACAACTGCATGTGGTAGCACACTGTTTAATC (SEQ ID NO: 961)
Homo sapiens dystrophin (DMD), intron 44 target sequence 4 (nucleotide
positions 1376035-1376075 of NCBI Reference Sequence: NG_012232.1)
CTTTTCTCAAATAAAAAGACATGGGGCTTCATTTTTGTTTT (SEQ ID NO: 962)
Homo sapiens dystrophin (DMD) intron 44/exon 45 junction (nucleotide
positions 1376066-1376125 of NCBI Reference Sequence: NG_012232.1)
TTTTTGTTTTGCCTTTTTGGTATCTTACAGGAACTCCAGGATGGCATTGGGCAGCGGCAA (SEQ ID NO: 963)
Homo sapiens dystrophin (DMD), transcript variant Dp427m, exon 45
(nucleotide positions 6683-6858 of NCBI Reference Sequence: NM_004006.2; nucleotide
positions 1376096-1376271 of NCBI Reference Sequence: NG_012232.1)
GAACTCCAGGATGGCATTGGGCAGCGGCAAACTGTTGTCAGAACATTGAATGCAACTGGGGAAGAAATAATTCAGCA
ATCCTCAAAAACAGATGCCAGTATTCTACAGGAAAAATTGGGAAGCCTGAATCTGCGGTGGCAGGAGGTCTGCAAAC
AGCTGTCAGACAGAAAAAAGAG (SEQ ID NO: 131)
Homo sapiens dystrophin (DMD), exon 45 target sequence 1 (nucleotide
positions 1376124-1376176 of NCBI Reference Sequence: NG_012232.1)
AAACTGTTGTCAGAACATTGAATGCAACTGGGGAAGAAATAATTCAGCAATCC (SEQ ID NO: 964)
Homo sapiens dystrophin (DMD), exon 45 target sequence 2 (nucleotide
positions 1376154-1376220 of NCBI Reference Sequence: NG_012232.1)
GGGAAGAAATAATTCAGCAATCCTCAAAAACAGATGCCAGTATTCTACAGGAAAAATTGGGAAGCCT (SEQ ID NO:
965)
Homo sapiens dystrophin (DMD) exon 45/intron 45 junction (nucleotide
positions 1376242-1376301 of NCBI Reference Sequence: NG_012232.1)
CTGCAAACAGCTGTCAGACAGAAAAAAGAGGTAGGGCGACAGATCTAATAGGAATGAAAA (SEQ ID NO: 966)
Homo sapiens dystrophin (DMD), intron 45 (nucleotide positions 1376272-
1412382 of NCBI Reference Sequence: NG_012232.1)
GTAGGGCGACAGATCTAATAGGAATGAAAACATTTTAGCAGACTTTTTAAGCTTTCTTTAGAAGAATATTTCATGAG
AGATTATAAGCAGGGTGAAAGGCACTAACATTAAAGAACCTATCAACCATTAATCAACAGCAGTAAAGAAATTTTTT
ATTTCTTTTTTTCATATACTAAAATATATACTTGTGGCTAGTTAGTGGTTTTCTGCTATTTTAAACTTGAAGTTTGC
TTTAAAAATCACCCATGATTGCTTAAAGGTGAATATCTTCAATATATTTTAACTTCAACAAGCTGAATCTCAGTTGT
TTTTCAAGAAGATTTTAGAAAGCAATTATAAATGATTGTTTTGTAGGAAAGACAGATCTTTGCTTAGTTTTAAAAAT
AGCTATGAATATGACTATGAAGCTAAAAAAAGTGATAGTGTCACTTACCTCTAGTTTCACCACATTTGTGAATACAT
TCTTGAAGGGGAACTTGAGCCAAAGAGGTACAAGTTTAATGGGGAAAACAAAACCTCAAAAAGGTTACTGTCAAATT
CAATCATCATTTAAATTTCCCTTGGAATGTATTGAAGGCACAGAAAGCCAAATGCGTGCTGCTGCAGTTGGAAAGCC
TAGAGAGTTTATAAATGGGATTTTGTATTATGCTTCCAGTTGTTGATGTTAATGTGTCTTGTTTCGTAAAGGAAGAC
TTGGCCTTTATTTACCAAATGAGACTATTGTTATGAACAATGAAAACTTCGTTCTTTTGCCAAGCTCTTGCATCCCA
CCCATCATCCACATAATAGGTGGATTTTAATATTCAGGAAGCTAGAACAACTCATTGATGAATATCTTTCGTTAAGA
TGTATTAAAAAGAAGATTTTGGAATTATGTCAGTTGTCTTTGCCCACCTCCTCTTTCCCTCTTTATTCATGTTACAT
TATTCAGAAAGTAGATACAATTCATATTTTGTACAAAATAAACACATTAGTTGACCTAAACACACACACACACACAC
ACACACACACACACACACACACACACACACACACACACACCCCTTGCCAAAGTTAAAGAATTATAGCCTCATCAAAA
GATATTTTGAATAATTAAGTCTTGGTTTTGAAAATCTTCTTGATTATAGATAGATAAAATAAAGAACTAAACTTTGT
AGTTAAACTACTTCCTTAGGTAAGTCATATACTTTTTTCCCAGATTGAAATTCTTCTCTTAATCATACAAGTATTTT
ATTATTTAGATAACTGATGTGCTTATACTATGAACAGGTATAAACCTGTATAATGTCATTTCTGAACTAGGCTCAAT
CTAATCCAAATTAAGATGGTAAGAAATGAGAAAATTAAAAAAATTGAATACCATACTATAAATATATATATACGGAG
AGAATTCATAAAGTGGATTAAATCGACTGGAAGATTATTTTTCTATAATATATAAAGTATTGTTTCCTATTTTAAAT
GTCTTACTCATATAGTATTTGAATAGAGTGTATTAACATTCCCTCTGATAACTCTAATTCACCTGAATTTTCAAAAT
CTTGTTATCTGTTATTGGGCTCTAAAGGCACATTATAATTTATAAACAAAGATGTAGCAATATGCCTGTTTCACCAA
ATAAGCTCTAAAATTTTAGATCTTTCTAATTTTATAAGAAAGTGGTATATGCTGACTCTGTTGTGAAATAGTATACA
AATTTTAAGTTAATTACAGCTAGGGATTTGGCTGTAATTAGGAAAAAAATTTTCCCATTTAAACATGTTGACCTACA
TTAAATATTGCACTTCAGTGCTTTAAAAAGTCAAGTTCAGCTTCCTTGAGTTTTTTTTTTAAGCTGAGCTTTTAAAG
TTGTCTATTTCACGCTACATTTTAAAAATAAATGTTAACATATTTAAATTTCCACTGAGACCACTTTTGTGGCATAC
TTCCTCAGGATTTTTATATCACTTAAATTTTATGAAATGTAAAAATGTAATAAAATATAAGTACTGGTTCTACCAAT
ATACTCATAGCTATTTCTAAGCATCCAGTAGCAAATCAAGTAAAAATTAATAAAATAATATTTTATGAATAATATGT
TAACCTAACAATTAATTATAGAAGGGCTGTAATCACGAACCTATTGCTAATCAATAGTGTACTCTCAGTGCAACGCA
AGCAGATGTTAGAAGGGAATAGAAGTTATTTATTGCACCGGTGAAAAATATATAAGATGCCTATTCAACTTAACAAC
AGTAGTCTTCGTTTGTAATGGACTTTAAGTACAGCGGTTAGAAATATTTAACATTTTTTAGTCCAGGGACATCAATG
AAAGAAAGTGTATAAATTCAAGCTAGATGTCTATATGGAGCCCTGTAGTTGCAAAACTTTAAGTCTTCTGAAATTTT
AAGATATTAGAAATAGGAAAAAAAATCTCAAAAGTTCAAATAATAGTGGACATCCAAGAAGGTTAGTCTATGTTGGA
AGCAAATGAAGTGTGAAATGTAGTCAGTTAGCGATGCAGTTTAAGATAGACAATTCACTACAGCTTCAATTATGTAA
CAGAAGAACTGGATACATCTATAGGCTTAAGCATGATAATAATGAGTTTAATGATGGCGTAGCCACCAAAACTGTCT
TTGTACACGAAGGAGGTGCAAATAAAAACCTATCATCGGCTGTAAGGGGAAGTCATAGGTTGATACAAAGCAAGCCT
GTGTACAAGTCTTTAAGCAAGCGTCCATGAATAGCAAGGGGCGCCATGCTCTTCACTGGAGAAGAAAATTACCTATT
TGTCTTTACTAACCTCTAACTGAAATTAAGCATTCCTTTTCATTTTGAAAGTAGGCAAAAAAATCACAGTAGTACAA
TCAGTACCTATGAAGTCACAGATATGTACACATCTCATTACAGTTATAATAAATATATCAAAATATCATTTATGCTT
ATCACTACTTCAAAACTGCAGTACTTATTATATGTGCTACAGGGTCTTATTGTTGGGCTTTAAAACATTATTCTGAG
GAATGTCAGGCTTCAACAGATTGCCAAAGAAGTCCAAGGCATAAAAAAATGATCCTAGCCAGCTGTCTGTTTATCTG
CCCAGAATCTCATCCTAATTTACTATGGTTTCAGTCATTTTAATGTGCAGTCACTATCTTCATACACTCCTTTTCTT
CTGGAGTATTCTAGGAGAAGACATACCAGTCGAGGGGTTCTGGGGAGCCAGGCCTTCAAGCAATGGATTGCTGACAA
CATAATGAAGAGGATTTTACTTAGAATAATGTCAGTTGATAAAAGTTTGAATGGGAGACGGAAGCAAGGCAGTGGGA
AGTGGAATTCCTAAATTGAGGAACCTCTGAATCATAATCCTTAGCAATAATAATTAAGATTTCAAAACATTATAATT
CTTTCTTCTTTTAGACAAGTCTGATATTGCTTATCCCATATCACAGATAAGGCAATTATTCTACTAATATGCATTAA
GGAATAGTGGTTTTAATTTAAGTGTTACCTTAATGAAAATAATTTTGAATTTTTTCCTTCCCCAAGTCTTTTTGTGA
AAAATTTCAAACATATAGAAAAATTGAAACAATTGCAAAACATATGCCCATTTACACTGTTTTCCTCCCCCTAAATT
CTTAGAGTCAACAATTGTTAACATTTTGCCATATATGCTTTTTTTCTCTCGCTTTCTCTACCCTCTTTCTGTATCTC
TCATATATAGGGCATCACACACACACACACACACACACACACACACTTTTTAACATTTTTGCAAATAAGTTATAAAT
ACCATTATATTTTACCCCTAAATAATTCAGCATGTGTCGCTTTGAAATACAGACATGCCATATATAACCATGCCTGT
TTATTATGCTCTCCTCCAAATTAAATATAATACTGCATTATTGTTAATATCCATTCCATATTCATATTTCCTTAATA
GTTCAAAAATGTCTTTTATATTTTGCAGGGGAGTTAGTACCAATATCTTATCATGGCTCATGCATTACATTTGGTTA
TTATTATTTTTCATCCTTCTTAGTCTAAAATAGCCCTTCCACATTTTTTTCACCGATATTGAAATTTGAAAATGTCC
AGGACGCTAGCCTCAAAAAATGTCTCATCTTTCAGGATTTGTTTTATTTTTTTTCCCCTGATGGGATGATTTAACTT
GTTCTGTAGTCTCTGAATTTCTAGTAAACTGGAAGTTAGGTCTAAATAAGACTTCAAGAGATGCATGTCAAACATGT
TTGGCGAGAATACTTCATATGAGATGCTGTGTATTTTGTATTACGTCACATCAGGAGGTGCATCATATGAAGTAGTC
TCACTAAATGCTGCAAAGTTTTATTACTTGCTTCAGGTGGTGACTGACAGATCTTGCATTATAATGTCACATTTTTT
CTTCGCAATTAATAAATCATCTAATGGCTTTAGTATCCATTGATGATCCTTCCCTAACTCAGTTATTACACTGGGGC
TTGCAAAATGGAGGTTTTCCTAATCTGACATGATCTTAACATTTACCAGCTGGCTTTCTTCTGTTTGAAAAAAAAAA
AAAAAAAAGGTTTTTCCTCTATATTTATGTCAAAATGGACTCATAAATTTTTATTTATTCAATATATTATTATGAAT
TACAGTTATTATTCTTGCCCAGAGCTTCCTGCTCAATTGTCCCAGGCTCACCTTGGACTTTGCCTATCCCAGATTTA
GAATTACCCATTTTTTTCAAGGAACTCTGGTTACTTTTAGAGGTGAATAGTACGTAGAAACGTACATCTGGGTAGTA
GCCCCTTCTCAATGGAATGTGTGCACCTTTCTGGCAAGCAGTCCCAAAGGAGATAATATTTTCAGATTACCTTGGAA
ATGATTCTTGACAAATCTCTTTCAGAATACATGGAAGTTAAAAGTAAGTCTAGACATGTTAAAAAGCCCTTCTTGTG
TGAGACTTCATGTACGGTCATTAAGTTACTACTCCTTTAAACCTCTCTACTTCTGAATTCTTAAACCAAAATGTACT
AGTATATAATCTATGCTGGTTTGCCATGCAAATTAATGGTGTAAATAAGATAATGGGAGGCATTCGTAAATGTACTT
AAAGGAAGAAATTATTGTTTAAAGACCTTAGCTCATTGTTTGCATGCAAATACACGCTGTTGATTAGAAATGAGCCT
TATCTAATTCATTAAAGTAGGCCTGGTTGGTCCTCTTCTTGAAAGTCTCCATTAGCAATTCATATTGCTCTATGCGC
TTCCTTGTAAGACAACTGTTGTCTCTTAAGTTTTCTTTAACTTTGGCTTCTTACAAATTCAGACCCCACCCCCAACC
AAATAGCTTTCAACCAAATAGCTTTTCAGCATCTTATTTCCTACAAATTAAAAGCGAATATTTTAATGACTCAAATG
GCTCTTTACAGTGTGTGCAATATGTTAAATGTACCCAGTATATCCGTGTGAACCAGTGCTACAAGCCTGCTCACACA
TTCACATTTTGCCCCCAGGATCTGTCCCGTCCGCTTGCTCTGTACTCAAACTTCCTTTTTTTCTCATTGCCAGTTTA
GACCTTGACTCTCCATCCAGCCCAGAGTTTGGAAACTGAGTACCCACAGGCTGAATCCTGAATGCATGCAGTATTTT
TGCATAGCCACTGTTTTTAAATAATTGACAACTTTTAAAAATTGAGAGACCTCATTTTTTAAAAAAATATGGATTTC
TGTCTTCTTTTGAAAATTTAGATCTGGCTACTAGGCACTCATTACTATATTTTCTCTTGGCACCATCACCTACAACT
GAGTAACAGATGTTTCATTTTCTTGCTACTCAAAGTGTGGTCTCTGGTCCAGAGCACAGACATCACCTGGGAGTTGC
TAAGAAATGCAGAATCTAATAAATAACAGTCAGCATTTTTAATAAGATTTCCAAGTTTCCAAGTGATTCATGGGCAC
ATTAAAGTTTGAGAAGCATTGCCTGGGGTAAGCAAGCTTTGTCCTCAGTTTGCAGCACCTGTCCCACTTTGCTCATT
TATATTAATTGCTTTTCCATAGATATTTGATTTTATAGTACCTCATGCAGACCTTTGTATGATGATGACGGTTAGGG
TGGTGATGGAAGTGATGGTGATAACACTTAATATTGCCATGCACTGTTCCAAGTGTTTTACGTAGCTCAATACTTAT
AACAACTCTATGAAATAGTTGCTATTCTCCTTTTAATTTTACAGGAGGGCAACGAAGGCACAGACTGATAAAACTCT
TTGCCCAAGATTGCACAGCCAGCAAGTATTTGAACCAGGATGCAGTCCCGCAGTCTGCCTCCGGAGTCCTTACTCTA
GATCAGATTTTGCATTATTTATCCCAGTTTTGTCCATCAGGATTCTCTGGTATACACTTGCAATTTCTTCCTACCAA
CCTTCTCCTTACCTTTGATGGCCACACGTAGTAGCAAAAGAATTGAACATAGAATCTGTTCTGACCTATCTTTCCAA
CCCTGTTTTTCATAATTTCCACTATTTCTGTTTATGTCTGAAGCTTTGAATGACCTGAAGTTTTCTGTTCTTCAGCT
TTTGCAAAAAAAAAAAAACAAAGAACAAAAAACAAGACAAAAAAAAAAAAAAACCGCTTCCTTTGGTTGAATTCTCT
TTCCCCTTATTTTTTTTCCCAAAATCTTACACATCCCTTAAGACTCATCTTAACTGCTATTACCTCAATGAATTGTG
ACCTGCTCTTCTCAAACATAAGCAGTTTATTCTCTTAAGGTTTTCTTGCCCCTTTTTATAACACTCATGTAATATTG
TATGTATATATCATGTATCATACCTATTTACATATGCTTTTCCCCCAGCAAGATTAAAAGCTTCATGAGGGCAGAGG
ACTCTCTTATTGTTATCTCTATAACCCACAGTACTTACCAGAAAGCCTGATATATTGTAGATGGCCAGTAAGTACTT
TCTTAATTTAAATCGTAAGAATTTTATTCACATTCAGATTAAACTGAAGATTTAAATCTTTACACTTGACATTATTA
TATAGATTAAAAATAGATCTAAAGAGCCAGACCAATTTTTCTGTTTTTATCATGTTATCACATTTCCATGGATACGT
TTGCAATTCTAGAAATTGACCTTGATCCCTTCTAGTCTTAAAAAAATGGAAGGAGTTTGGTTAATAATATTTTAGGT
ATTCTTCAGAATTTAGTACATTTAAGAGACAAGTAACTTCAATTTATTTAGCTAGTTATGGCAAAAAGCAGCTCTTT
GATTCAAACATTTTGTACATTTGTTTATCCTACTCTCACTGTATCTCAACTAATACCTTTTAAGTGAATTAAGCAGG
AATTAGCCCTGAAACTGAATGTTTTAGCCTCATCCTACATATAGCCACAAGATGTTTTAGATGCAATCCATATCACC
AAAGAGCTATTTTTAGATTGATCAGAGAGAATCATACAGATATTATTATTCACAGGTGTCAATGGAAAAGCTGGTCT
CTTCCCATCTGTTCTCTGATGACTCTTGAAAAGCTTTCAAGGGCATTCATAATTCTTCATCAAAAGACTATGAAAAA
TCAGCTTCATAGTTAATTGTTTTATGTCATATTTTATTTTTTCAACTTGGCTAGTTCTAGTGAAACAGACTAGCTGG
CACCAAATATGTTGTTGCATTGGCTGGTAATGATGATACCACTGTGTGGAGATATACAAGTGAATGTACTTTATTTG
TGGCCTTCCATGAACTTTATGTGCCTGGGAAAGTAGGAGTTAGGGAGAGTTTGTTAGGGAACGTGATCTCTGGGATG
GGTCTTAAAGGATGAGAAGAGGCAAATGAAGAGTAAATGGACATGCCAGAGAGAAAAAGTGACAGGAGCAAAATCAC
TGAAGCAAGAAAAAATGGCCTACATTGAAGGACTATACACAGTTCAGTATAAAAAGGCTCTGTTAAGCAAGCACCAT
TGACTTACCCTAAACTCTTCATTTTCTACATATAAACTGCCCAATTCCCACTCCAAACCTATTGATGGATATTAGTA
ACCTATTGATGTTTTTGAAAGGTGTTCAAGTATCCTTTCTGGTACCATGTACCTTGGCTCCCACCATTTGAGAGTAT
GTTCTCCAAGAGGCAACAGTCTGTGGTTCCTGACCTGGCTATGCAAGTTATTCTTATTATTAAAATTGTCCTATTTA
ATTAAATATCATGAAAACTAATGAAATAGAAATGAAAAGATAAGAGAATTGTGGTTTCTATGAATACTAAATTGAAT
GCTTTGGAAGACTTGATAAAGGTGATTAGAAAAAAAAAAAAGGCCAGATGCGGTGGCTCACACCTATAATCCCAGCA
CTTTGGGAGGCCGAGATGGGTGGATCACCTGAGGTCAGGATTTCGAGACCAGCCTGGCCAACATGGCGAAACCACAT
CGCTACTAAGAAAATACAAAACTTAGCCAGACGTGGGCCTGTAGTCCCAGCTACATGGGAGTCTGAGGTGGGAGAGT
TGCTCGAACCCGGGAGGCGGAGGTTGCAGTGAGACAAGATCATGCCATTGCACTCCAGCCTGGGTGACAGAGTGAGG
AAAAAAAAAAAAAAAAAAAAAACCACGGTGCTGTTGAATTAGATGTAGGTAAGACAACTGTTTAAGATTGGGTATGA
GGGATAGAATCCCCAAAAAATGGAGGTATTTTGCATTGAGATTATTTTCAGCATCTCCAAATCTGACTGTAATTCAA
AGAAACCAAACTAAAAGTCACAGATTATGAAATGTAGAAGTGTTTTATGCAAAAAGTAATATGCTTAACTTCAACCT
GTGGGCTTTTACTCCAGGAAAAGTCTCGGACCCCATACCAAATGAGAAGTAAATGAGTGACCACTTGTATATTCTAA
GAAAAATAAAATGTTTGAAGATGTGTAAACACATTTATATAATCCCTCCAATTTTACAATATTTTTCCAAAAACCGC
CTATCCACTTACCCTAATCAAGTTTGATAAGGGGACTTCCTTTTATATGTAGGAAGGCTGAAAAATGACGCCATGAC
AAATGAAATTGTCAAGATGGACCAGGTCATGGAAGATTTGAAATCTCAAAGAATTTTTTCCAGGGTAGAATATAAGG
ATGTTGGGACGTTTTTATATGCTTTAGATTTGCATCCTCATATGTCCCTTTGACAGTTGAGCTCAGAGTGAAAAAAA
GAGAGTGAAACTAGTGGCAGGGTGACTCAAGTTAGAGACAATGAGTAAGCAGAATAGAACTTTAAAAACCTGACAGA
TTCAAGAAATACTTGATGAAAGTGGAACAATTTAGTCGTTAAGTAGATGGGATGATGAGGGGAATGAAGGGACAATT
CTAGGATGATCCCTTTTCCAGGTTTTTTGCTTGGGGGAACTGGCTGCATGGAAGGCTGTTAGTCAGGATAGGAAATA
CAAAGGAGAGTAACTGAATGGAAAGAGGAAAGCAAATCAGACATACAGAGCTCAACTTGGGATATAATAGTCTTAAG
GAGCTCTTGGAACATTGAAAATAAGGTGATCAGAAAACACGCATTTGAATAGGTAAGTCTGAACATCAGGAGGAAGA
CAAGGGCTGAAGACACTGAGCCATTTTGCTGTCAATGTAGAGATGGTGGCAATCTCCATTGAACTAACTGCTTCTCA
ATAAGGTACCTTTCTCAAGTCATTAATTTGCTAACCAGTAAACAAACCAGAATTCCCAGAGTACACATTAACCATTA
AGCACTGCTGTGGAAAAGGAGTTCAGGTGTCAGGAAGCCAACGTGGCAGATGAGCACTAGTGGTGACAAATGAACCA
AAGTGATATGGGTGATCTTTATGGGGCCACAGAGTACCACTGTAAACTATCACAAATCAGAAGGGTTGACAAACAAA
ATATTGGGGATAAATCAGGGAAAACCTACCACAACATACAGGAAAATAAGTTCAAAGATTTCATCCTACAGATTGCA
GATAAGAAATGAGCCCTTTTTATTTGGGGCACCCTAGGGAAAGAGTAGATGCCCATATGTATATTTAAAGTATGAAT
ACAGCATTTATTTGAATATACTGCAAATGGTCAATACAAGGGTAGCTACAGAGCCCATAACATGAAAAGGAAACACA
AAGAAATACATGCCCCAGTCAGACTCCTTACTTGGGTTGCTGTAAATTCTCTCTCCCTTTAAGGTTATTGCATTTAA
AGTCTATCTGTTGATTGGACCCAACAGCAGCTGCACCAAGACTGTACCATTTTTAAAAAAAAAAAAAAAAAAAAAAA
ACAGGCCAAATGGCATTCTGCATTTATTTTCCTTGTTGCTGAAGAAACTTGAATTGTCTACCCTCAAAGCCTGTCCT
TTGAGACACATTTTATAATTAGAAACACTTATTTACAAAGTTCTTTTTATGTTAGAATCACAAATCATAACACTCCA
AAAAAGGAATACACTATCCTCAGGTGAGTGTCCTACCTTTGTTTACAAAAGAAAACCCAAAGTCCTAAGAGAAAAAT
GTGTTGATCATTTTATTGATTCCTTACCTTGGTTTAATATAGTTAATGGATGTCTTAGATATGTATAATAAGTCTAT
TATCATGTTCCCTTTAAAATTCTCTTTTGTTTTACTAATTATATGTTGTCATAGTTTGACCATTAATATAAGTCTAA
ATTTATTATAATGTGATTTTTTCTACAAAGGTTAATTTGAATTAAAATATTTTATTTTATCTCTCTCTACTATGATA
AATGTTTTTAAAAATCGTTTGTAAAATGAAAGTACTATATTTGTGTAAGCTGCCAATCTAACAATTTATCATTTACC
ATTATGATGGTGAATGTATAACAATCCTTATATTCAGCAGAAAGCCTTATCTCTCATTTCAGAGGAATCTTGCCCCG
GTTAATTATTCTGTCTCTTGAATGCACACAAACACAAGCATATCTTTACCCTTTTTCTGCTGCCTCACTATCCCTGA
TCAGGTGAATGTTTTTAGCTCCTAGATTACAATATAAATATATTCAGACATTCCTTTCCAAATGCATTCATTCCACT
GTACTTGTCAGAGTTCATAGCTGTGAATAACAGAACCCAGTTTTTGTTGATAGAAGCGGAAACGGACTTTAGGAGAA
AGATACAGACCTGTTCCCATTCCTAAACAAAGGGATAGAAAACCAGCTCAAAATGGGCAGAACTCAAAAAAGAGGCT
CAGCTCCAAGAACTATAGTCCAAATCATACCCTAGATTGGATCTCGAACTCTTGGACTCAAGCGATCCACTCATCTT
AGCCTCCCACAGTGCTGGGATTACAGGCATGTGCCACGACGTCTGGCCCCCATACACTAGATGTAAACGTTGCCATG
CACCACTCTACCACTGCAGACACTGGGTGAAGAATGTCATTGCTACTGGAAAGAATTCTAGATAGTGCCTTATAATT
CTGTCACTCATTCCAGATTCAAAAACTGAACTTCCCCCATCAGATTCCATTTGTATTTGGGGATTTTGTTCGACATA
ATCAGGGCATTCAGATTCTGGGCAACCAAAGTTAACAAATGTCTCTTACTTCCCCTTTCTTGTTATTATTCCCATTT
GAATCTTCTTCATAGTTAGTCACTGTTACTTAAACACACATTCTCTATTATCACATTTCCCTCTCCTCTCTTTTGCT
GTTTGCTTTTGATCCAAACCACTGCTCAGAAACCATTATTGCCAATAACAACAATGATTTCTTGTAGTTAAATCCAC
TGGACATATCTTAGTCCTATTATCCGTAGGCCATGTGCCATTAACTGAACACTTTCCGTATTAGCACTTGGTCCTAT
CTTATCTTCCAAGTCACTAATCTTATCTGAATTTATTCTTACCTCTCTATGTAATTCCTTACTATATTGATGACACT
CCTTGCTTTACCTGCCCCTTACATCCTGATGTTTCTCTAGGACATGTTCTGAACCCTCCCTTCTTCTCATTCTATAC
GGTTTCCCTGATTGTTATCCATAGCAACAAATGTAGCTTTCACTGTATCAATTAGAATAATATCTAGGGAGATTAAA
AAAGAATTATAGTAACTGAAACAAAGTAGAAATATATTCATCTTCTTGTAGAAGGAATCTGCCAGTAGGTAGTCCGA
GGTTGGTATCATTGCTCTATGATGTTGAAGATCCAGATCCCTTCTGTCTCACAGATCTGCCATCCTTTGGTGAGGTC
CTTACACTCATGGATCAAGATGACTATCAGCTCTCTATCTATCACAACTGCTTTTCAAAGGCTGCAAGGTGTAGGAA
GTGGACAAAAAAGGGATACCTCTACCCTTTTAAAGGGACTTCATGGAAGATCTACACAACACTTTAGCTTGTATGTC
ATTGGCCAGAATTTATTCTCATGACAATGCCAAACTGCAATGGGCATTCAAAATGTAGTGGAATGGATCATGGGCTA
AGCAGCTAAGCAGTCTCTACCAAAGTCACCGATTTCATTTTATGGCCTAAGTCTAATATTTGGCCCAATATATAGTT
TCAGATTAGACCTACATATGTAGCTTCAAATGGACCATTTCCTCTTCTATGTCTCAAAGCCATCTCAAAGTCAGTAT
ATCCAAAACTCAACATGTTATATTCCTCTCCCAAAATCTACTGTGGGTGATATCACTATCTATTCATGTACCCAAAC
TATAAATTTGGAAGTTACAAGAGCTAGTATTAATGACACTAAGTTTTGTGCATTTACTCTATGAACAGGACTTTGAT
AAGAGTTTTACAAATGTTTCCCACTTAATTGTCGCAATATCTCAGTTATAGAGATTTTATACGTCCATCATCTCACC
TGACTCTTCGAGATCATAAGCAAAGCATGGCAGCATTCTTATGTCCATTTTACAAATTACCACATTAAGCACAAGAA
AAAACAAGATATATGTCCAAGGCTAACCAAAGTTATAGAAGGATCGAGAACTAAAAGTCAGTGATTTAGACCCAGAT
CTGTGCCTTTTCCCTTATTGTTACATATGACCATATCTAGCTATGTGAACAAAGCAGCTAATAGTGACGACAGGGTA
GAACAAATAAGAAAGTGAATATTCCCCACTACATTTATGATTATTTGCCAGTTTAACAGCTTCAAGCCTGTGTCTTC
TCAGATATGTGCTTCCTCTTATGTCTAAGGAAAAGTACTATATTTGATATGCTTTTATGAACTTTCTTTTTTGAGAT
GGGGTTCTGGCTCTGTCACTCAGGCTGGAATGCAGTGGCATGATCACAGTTCACTGCAGCCTTGATCTCCCAGGTTC
AAGCGATCCTCCAACCTCAGCCTCCTGAGTAGCTGGGACCACAGACACGGGCTACTACACCCAGCTATTTCTTTTTT
TTTTTTTTTTTTTTGGTAGAGGCAGGATTTCACTGTGTTGCCCACCTGGTCTCAAACTCCTGAGGTCAAGTGATCCA
CCCACCTCAGCCTCCCAAAGTGCGGGGATTACAGGCATGAGCCAATGTGATTGGCCTGAATTTTTTAAATTTAATTT
TATTGAGGTAAAATATACCTCTATATAAATAAAAGTAAATATACCTTTACCATTTTTAAGTATACAGTTCAGTGGTA
ATAAGTAAATTTATGTTATTTTTCCCCTTTGTCCCCTCTCCCTACTCCTATTTCTGATCTCTGGTAACCACCAAGGT
AGTGTCTACTTTCATGAGATCCATGTTTTTAGCTCCCACATGTGAGTGACAACACATAATATTTGTCTTTCTGTGCC
TGGTTTACCTTACTTAAAATAATTACCTCCAGTTCTATCCACGTTGCTGCAAATGACAGGATTTCACCCTTTGTATG
GCTGAATAATATCCCATGGTGCATATATATATATCACATTTTCTTTATCCATTCATCCTATAAATTTTAAATGGTGT
GGAATTTGGAGAATACTTAAGGAAAAATGACGATTGTGTAAAAGGAAAGTATCTACAAAAGCAAGGTTTATCTACCC
CATAAAGATAACAAGAGAATCTGTGAATGTGGATACGGTTTCTGGAGTGTTTCAGAGGTTGAAAGATTGTGAAGAAC
TGGATGGGTATAAAAAAAAGTGAGGAGGAGAAGAAATGAAAGTTCTGGAATGTTCTGTAAATTGTAGATGAGTTCCC
TATATTAATTTTAAAATGTAAATTGAGATTATAATTATTTTTTGATGATCTATTTTTGCTGGGCTGATTCTCTGTTG
GTGTAACTCTTTAACGAATATGGGTCACGTGGGACCCTGGATTTTATTAGAATTACATGTGCGAATCAAATTCTAAC
TTTATGAGCCAATATAATGATTGTTTTTTTAATGATTAGAGTCTATCCATGACAAAAACAGCTTGTTTCTCCTACTG
ACTTATTTGGTGTTTTCTTGCTAATTAGCCTTTATACTAGGCAGTAGTAAATCAGAGTACTTGGACTTCAGGTTGGC
CATTACATAAACCTGGCAACTAAATGCTGGGTAATAATCACCTATCTTCCCACCTGTGTTTATTACCTTTGGAAGTA
TGTAACATGGTATCTTTGCGTTTATATTTTTAATTTGTTCTTTTTTCTCTTGCACCAGCTACTTAAATTATCTGAGC
TTCCTTTTACTAATCCAAAAATAAAGATAATAGTACATATTTATAGAGATGTTGTAAGAGTAAGAGGTAATGTAAAT
AAATTGGCTAGCTCTATGCCCAGCACATGAGTAGGTGCTTAGAAGTTAGTGTCTGGGTACATGACTTCTGGGGATGA
TAAAGTGAGTAGCTCGATAAATCTCCCCAAGAATCAGTAAAATGGGACACACTGGAGAAAACATCTTATGACCCTGG
ATATCAACCAACGGCATATGCTAAATTAAAAAGTGATTATTTATAAAAAGTACTAAACTTTGTATATGAACAATATG
AATTTGTGGTGTATTTGCCTGTATTGCCCCCAGTCCCCACTCCCAGCTTGGTCAAGCATAATAGTTCTATCAAGGTA
GAACAAGCCATGGAAATAAGCAGCTTCATCACCACAGGGACTGATTTTATTTGAAGCAGAAGTTTAAAACTCCATGT
CCAGAAGCATTGTCAGTAACGGTGGAGACCTAGGCGGCAAACAAAAAGGCAGAATAGCAACTCAGCTGGCCTAAAGT
TGCAGTCTTGATTGGAACAAGTAACTGACTGGCAGACTGGCCAGAAATTTAATTTAACCAGCATATCTGCAAAATGA
GGCAGCCGTAATAGGCCTCAGTAAGGACTCCTTGTGTCTCCTTCATGAAAACTTAAAATGTGCCTGCATGTTGAATA
TACCCTTTAACACATATAAAGAACCTTTAGCAAAACTTGGAAGTCTTACTGGCTTGAGGTATTTAAGATCAACTGCT
GGCCAACTATTGACTAATGCAAATTAAGCTATGCTTACCTCTAGGAAACTAGGCATACAGTTTGTTTCTGTTGTTTG
ACAGAGAAAGAATATCAACAGCCACACACTGTGGGGAAACAGATTCCACAGATTTCATCTAGGCAAGTTATTAAAAC
TTCAATTTAAAAAACGCTGGGCATAAGAAGGAACATCAGAATTTGGGGCTCCTTTAATATGTTATTTAAAATGTCAA
ATTTTCAAGAAAAATTTACGATACGTTCAACTGTGACCCATTCTCATGGGGAAAAGCAGTCAACAAAAGTTGTCTCT
GAATTGGCCCAGGTATTGGCAGATAGAGACTTAAAGGCTCCTACTATAAATACCTTCAAACAACTGAAGAAAAGCAT
GTTTAAATAATTAAATGAAAGTATGGTAACAATAACTACAAATAGAGAATCTCAACTAAAAGATACACACTATATAA
AAGAACCAAATGAAAATTCTAGAATTGGAAAGTAGAATAACCAAAATTTAAAAAAATCACTAATGGGGCTCAAGAGC
AGATAGTAAGACAGAAAAAAAAAAAAATCAGTAAATTTGAAAATAGATAAATAAAAATTATCCAATCTGAATGTCAG
AGGTAAAACAGTATAAAAAACGAACATGAGTCATAGCTTTGTGTCAAAACATTGAGCATATCAATGTAGATGTTACA
AGAGTTCCAGAAAAAAAGAGAATGTTGTTAAAGAGGCAGAAAAATTATTTGAAGAAATAATGGCCAAACACTTCACA
AATACGGTTAAGCTCAACAAACCCCAAATAGAATAAACACGAAGAGATCAATACCCTAAAACATAAGAGTCAAACTA
TTGAAATAGTTTCATTTGAAATTATTGAAAGACAAATGGGAAAGTCTTTAAAACAACCAGAAAAAAATGACTCCTCA
TGTACAGGGATCACATGATTGATAGTTAATTTCTCATCATAAACAATAGAGGCCAGAGGTATTGAAATGACATATTC
AGAGTTCTCAGAGAACACAAAATTGCCAACCAAGAATTCCGCATAAAACAAAACTATCCTTCAAAAATATAGGTAAA
ATAAATATATTACCAAGTTGAGAATGAGAATATTTCTTGCTAGCTGACCTGACTTACAAGAAAAAACTAAATAAAGT
CATTCAGGCTGAAAAGAAGTGATATTCAGTAACTCGAACCCAAATGAAGAGATAAAGAATCACAGAACTGATAAATA
TGTAGATACATATAAAAGACTGTACAAATATAGATATATGTTTTTCTTCTTTTAACTTCTTTAAAAGACCTAAGATT
GCATAAAAATTATAACATTGTGTTATTGTGTTTATAAGCAGGAGGAGCAAAAATGGAGCTTAGCAGAGAAAAATATC
TAAATTTTACTGTGTTAAATTAGTTTGAACTTAAGTAAATTATGATCAATTAAGATGCATATGTAATCTTTAGAGCA
AGCACTAAGAAAATAAATAGTTAAAAACAAAATTTAAAATTACACACTAAAAATAACTAACAAGACAGTGCAGTAAA
GGAGAAACAGGAACAAAAAAGACATGAATAAGATGTGAAAAAATACAATATGGCACATGTAATTGCAACTAAAAGTT
GAGAATTCCCATTAAAAAAATCTGAAATTTGAAATGCTCTAAAATGTGAAACTTTCTGAAGGTTGATATAATACCAC
AAGTGGAAAATTTCACACCTGACCTGTAATGAGTCACAGTCAAAACACAGCCAAAACTTTGTTTCATGCAAAAAATT
ATTTAAGATACTTTATAAAATTACCTCCAGGTTATATGTATAAGATATCTATTAAGATATATATATATACATATATA
TATATATACATATATATATATATACACATATATATATATATATATGTATATATATAGTATGTGTGTTTAAACTTAGG
TCCTATCTCCAAGATATTAGGTATATGCAAATATTACAAAATCTAAAGAAATCCAAAATCCAAAACACTTCCAATCC
CAAGCATTTTGGATATGGGATACTCAACCTACATATCAATAGTTATAGTAAATGGGAGTGAACTAAGCATTCCAATT
ATAGGCAGAGATTTCAGACAGGATTATTTAAAATATCCAACCATAGTTTGTTTAAAAGAGAAATGTATTAGAGCCAA
AACCATATAATTTCAAAGAAAAAAGAGGTACTATGCAAATTGTTTACATATAAAAAATGAAGTGACAATACTAATGT
CAGACAAAATAGACTTTATGACAAAATATGTAACAAGAGAAAAAGACATTTTTAATTATATAAGGGGTCAATTAAGC
AGAAAATATAACAATTATAAACGTATATAATTAATAGGAAAGTCCCAAATTCTATGATGCAGAAATTGACAGAATTC
AAAGGAGAACTAGACAATTCAACAATTATTATTGGAGACTTCAAACCCTACTCTCAATAGCTGGCAGGCCAATTAGA
CAGAAAAATAGCAACAATATAGAAGAATTCACCAACACTATCAACCAGCTTGACCTAACTAACATTTATAGGAGACG
CCACCAAATGAAAGCAGAATACATATTATTTTAAAGTGCACATGAAATTTTCTCTGGGATAGATTCTATGCTAGGTC
AAAAAACAAATCTCAATACACTCAACAGGCTTGAATTCATAAAAATTATGTTCTCTTAATATGTCAGAATTAAATTG
GAATTCAACAGAAGGAAATTTGGAAGATATCAAAATATTTTGAAATTCAACAACTTCTAAATCCATTGGTTAAAAAC
TAAATCACATAGGAAATTATAAAATATTTTGAACTGAATAAAAATAAAAGCACAACATGTCAAGATTTATAGGATGT
AACTAAAGCAGTGCTTACAGGGAAACTTCTAGTTTTAAATACCTATTTTAGAAAAGAATAAAATTCTTAAATCATTA
ACTCAAGCTTTCGCCATAAGAAACTAGAAAAAGAAGAACACAGTAAGCTCGAAGGAAGCATAAGGAAGGAAATAACG
GGGGTTAGAGCAGAAGTCAATAAAATAGAAGAAGAAGAAAGAAAAATCAATGAAACCATACATTAATCTTTGAAAAT
ATTTTTTACATGGAGAAGCTTTAGCTAGACTGACCAAAAAAAAAAGAATTACCAAAATCATAAAGGAAAAAGGGGTA
ATTACTACCAACCCTACAGAAATTAGAAAGACTAGAATGTAATAACATGAACAACATTGTCAACAATTTCTGCAAAA
CATATTAAATGAAAAAATTCTTAGAAAGACATAAATTAACAAAACTGATTCAAGAAAAAAATAGACATATGAATAGA
CCTAACACAAACACAGAAACTGAATTAGTAATTTAAAATTTTCCAACAAAAAAACCCAGGTCCAGGAGAAAGATAGG
AATCCGAGGCATCCACAGTATAGAAGAAGAAATGAAACTCTCTTTATTCACAGACAATACAATCCTGTATGTAGAAA
AATCTGATATCCACAAAATAACTGCTAGATCTGATAAGTTCATGAAGCTTGCAAGATAATCAATATACAAGAATAAA
TTACATTCCTGTGTACTAGCAATAAAAAATTGAAAATGATACTAAGAAAATAATTTCATTCTTTGTAGCATAAAATA
GATTAAATGGTCATAAATTTGAAAATATAAGTACTAAACCTGTACTCTGAAAACTGTAATACATTGCTGAGAGAAAT
TAAAAATCTAAATAAATGGGACCATATTCCATGTTCATGAATTGGAAGACTCAATACTGATAAGGTAGTGATTCTCC
CCAACTTGTTCTATAGATTTAATGCAATCTCCATCGACATCTTAGCAGATGTTGGCACAAATTGAAAAATTGCACAA
TCTTGGCACAAATTGAAAAATTGATCCCACAATTTATATATAGCAATTCAAATGTACCAAATAGCCAAAACAATTGT
GAAAAAGAAGAAAAAAGTTAGAGGACTTTGAAATCAGGACATTACCTGATTTCAAATCTTGATGTAAATCTGCAATG
ATGAAGACAGTGTGGTACTGTCATAAGGACAGGCTTATAGATCACCTGTAGGTTTAGGAAACAAACCTATTCATATT
TTTTTCTTAAATCTACTAACTGCACTCCTAATGTTGACAATGGAAGAGACTCGATAGTCCAGCAATAAACTCTTATA
TTTATGGTCAATCAATATATGACAAAGGTGACAAGATAATCCAATAGAAGAAAAGCTTATTATTGGGTAGCTTATTG
TTAGTGTACAGAAACAGAGCTGATTGTTAATACAACTCAACAGGAAAAAGGCAAATAACTTGATTTTTAAAATATTT
AAATATATATTTCTCCAAAGAAGACATAGAAATGGCCAACAGGTATGTGAAAAGGTGCTCAGCATCACTAGTCATCA
GGGAAATGCAAATCAAAACCTCTGTGAGATGAACACTATCATCTCACCCCTGTTAGGATGGCTACTATAAAAACAAA
CCAAAAACAAGAGATAAGAAATGTTGTTGAGGATGTGAGGAAATCGGAACGCTAGTACACCATAGGTGGTAATGGAA
AAATGATGCAGCTGCTATAGAACACAGTAGAAAGGTTCTTGAAAAAGTTAAAAATAGAACTACCATATGATCCAGCA
ACCTCACTCCTGGGTATATATCCCAAAGAATTAAAACCAGAATCTCAAAAAGATATCTGCACTCTCATCTTCTCTGA
AGCATTATTCACAGTAGCCAAGATATCAATACAGCATAGCTGTGCATGGAAGAATGCATGGATAAAGAAAATGTGGT
GTATTCATACAGGGAATATTATTTGGCCTTAAAAGGGAAGGACGTCCTGCCATATTTGACAATATGTATGAACCTGG
AAGGCATTATGCTAAGTGAAATAAGCCAGTCACCAAAGGGCAAATACTGAATGATTCCATTTATATGAGGTGTCTGA
GACAGTCAAACTCGTAGAACCAGAGAGTAGAATGATAGTAACCAGGGGCTGGGCGAAGGGGGAACTGGGAGTTGCTG
TTCAATGAGTATAAAGTTTCAGTTATATAATGTAAATAAGTTCTAAAGATCTGCTGTACAACATAGTGCCTGTACTG
TGCACTTAAATTATTATTAAGAGGATATGTCTTAAGTGTTCCTACCATAAGAAGAAGAAGAAGAAGGAGAAGGAGAA
AGTGAAGAAGAAGAAAGAAAAAATGAAGGGGGCATGAGCAAACTTTTGGAGTTGATGCATATACTTGGTTACCTTGA
TTATGGGGATGGTTTCATGGTTGTATGCTTATATCCCAATTCATCACATTGTATACAGATGCTCCTCACCTTAGGAT
GGGATTGTGTCCTGATAAACCCATCATAAATTGAAAATGTTATGAGTCAAAAGTACATTTTCAATTAATGATATTTT
CAACTTACAGTGAGTATATCCAGATATAACCCCATCCTCAGTCCAGGATTATACTAAATGTGTATCGCTTTTGCACC
ATGGTGAACTTCAAAATTGTAAGTCAAACCATCGTAGTCAGTCGGGGAAGATCTGTTTGTTAATTATGGACCCATCG
TGTACACCTTAAATACTTAATAAAGCTGTTAAATGAAAATTAAAAGTTGACTGGGCACATGGCTCATGCCTGTCATC
TCAGTGCTTTGGGAGGCCAAGGCAAGAGGATTGCTTGAGGCCAGGAGTTCAAGACCAGCTTGGGCACATAGCAACAT
TCCATCTCTACATAAAATTAAAAATGTAGCCGACTGTGGTGATGCAAGCCTGTAGTCCTAGATGCTCGGGAGGCTGA
GTTGGGAGAATTTCTTGAGCCCAGGAGTTGGAGGTTACAGTGAGCTATAATCATGCTACCACACCCCAGGAGACCCT
GTCTCAAAATAAATAAATAGAAGCTTTAAAAAATATTGGTATCTCAGTGTTCCTCATTATCCACTGTATTTAAGGTT
TAGCTACTTGTGCTTGATGCTTGACAAGGTAATCTTACTTTTCTCCCTGATATTGGTATGATGCAAATTTACTATAT
ATATGACACAAATTTATATATGCAATATTTTCTCGTTAATGGCCTTTTATTTTACTCTCATTTTCATTATGCTTTGC
CTTTTAAGTCATATAGCAAATAAATTATGTGGCATTTTCTTAGCAACTATTAATTCAGGAGAATGGGAACAGAATTC
TCTCATAGATTCAGCTGGAAGGTAATGATGGTCAGCTCCCAGTGGAGAAAAAAAAAAAAACTCCCTTCAGTTTTCGT
AAACATACAGAGAAATTTTCTCCTAAGTGCTATGTCAGTCTGCTGTATGTCCTATTGATCTGAGAACCAGAAAACAC
ATATTTTAGTTTACACTGCCTTGACTCTATTGTACATGGCTAGGTCTGTTTAAAAAAGAAATCCTTGAAGATACCCT
TTGGATTCTAGTATTTTAAAACGGATGCTTAGCTAAGTGAAGTGGTCTACTTCAAGGATCAAAACCAATCTTGAGTA
ATCTGTTAGGTAGACTCCCTAAGTTCATCTGTACCTTGTACCAAATTTTTAATGAATTTAGTAATTGACATGGATGT
AAAATAAATAATACACTAATAAAGTTCATGCAGAATCAAATTTTAATGCCCAGAGGTAATGTAGAAGATATTACCTG
TCCATTTCTCTGGACTTAGCTCCTGCAACTCTCCATTTTTCTCTCTAAACTTTAGCCACACTGAATTCCTAGTTTCA
ATTCCTCTGACTCGCTAAGTATTTCTTCTACCTTGATAAAAGCTAATTCCTTTGTCTTGTACCATCTGTATTCCGGC
TGATATTGACATAGTTTTCAGGGCTCAATTTCAATGTTACTTACTCAGAGGGACTCACTGTTACAACCACCACAGCC
TTTTCAATCTAAGTAAGATCCACTGCTCTTCTTAGAAACAGGTTATATTCCAAATGACTGTAAGTGCTTTTGTTCTT
AGAACATATGTCTCCATTCAAAAGACCGATAGATATTCAGTTAAGCCCTTTGAGAAAATTATAAATGTTGAGGACCT
TGATTATTATTGTTATTATTGCTTCTTTTCTATGTTTTCCCAGGACTCTCAACAAATTTGCTTTGCTTTTGTACTCA
TGGCACATAATGAGATTAATAATGTTTAGAAAACATTTCAAAAATACACACAGAGGAGACACATCTTAGTCTAAAGT
TAGACATGATACCAAAAACTATAATAACTATAGCTGACCAGTGACCCCATTTATTCATGGAAAGTAAAATTTGATGC
ATATTTGCCTTTAGGAGCAACATACCTATGAAAGTTCTGAAAGTGAAAGTTTGTAAAAAAGGAGTACTCTCCTAACA
ATCTTAATTTTTTTCTATATATATGTATGGTTTGCATTAAACTCTTTTGTATGATTAGTGGTTTAATGTTGATGTCA
CCCATGACACCATAAGCTACGTGTATGGACTGGCTCTGTTTTGTTCACTCCTGAATATCCAGCAAAAATAGTATAGT
GCCTGGCCCTTGGTAGATGTGTAATAAATGTTTGGTGAATGCATAGCTACACTTCAATGCTTATCGCATTTTAATCC
CAGCTACTCGGAGGCTGAGGCAGGAGAATCGTTTGAACCCAGGAGGTGGAGGTTGCTGTGAGCCAAGATCGCGCCAC
TGCACCCCAGCCTGGGTGACAGAGCGAGACTCCATCTCAAAAAATAAAAACAATAAAAAAAAGGAGACCCATTCATG
TATCTGTATCACTGACTAGCCTGTCAACATTTTGTTAACTACCTCATCAAGTAGCAAAATCAGTACCTGGTATGTGG
TAGATGCTCAAATATTTGTTGATAAAATACAGTAAGTTAATGACAGGCGAGCTTGCCTCAGTGAAATATAATCTGTA
AGTGAGCAGTGTGTATATCATTTGAAGGTGCCCTACTTAGCCTAGCATATCACAGAGATTCCCAGTAAATATTTAGG
CAGTTCATTAACTCTAAAAGTTGACCCTCATAGTCATTGGCCTACATTATTCACCTCCCTCTGTCTCTAATAAATTC
ATTGGCAAATTTCTGAACTCCAACTGGAATGTTTGTGGTGGATTTCTTCATACCTAATGGATTATTTCAATTTTCAT
TTTACATTGTATTATTTACTTGTCTGAGGTCTTTATAATGACAAACTCGGCATGCATGATAAGCTGTCATTACTTAT
GCCAGTTGACAAGGACATATTATTTTTCTACAAAAAAAATTATCTTGGCCAGGCGCGGTGCCTCACGCCTGTAATCC
CAGCACTCTGGGAGGCCGAGGCGGGCGGATCACGAGGTCAAGAGATCGAGACCATCCTGGTGAACATGGTGAAACCC
TGTCTCTGTTAAAAATACAAAAAAAAAAAAAAAAAAGCAGAACAAAACAAAACAAACAAACAGGAGTGGTGGCGGGC
GCCTGTAGTCCCAGCTACTCGGGAGGCTGAAGCAGAAGAATTGCTCGAACCCGGGAGGCAGAGGTTGCAGTGAGCCG
AGATCGCACCACTGCACTCCAGCCGGGCGACAGAGTGAGACTCCGTCTCAAAAAAAAAAAAAAAAGTGGTAATTGTT
CAAAATATTTACTTATTAATTCATTTTAAAATTGCATGTTGAAATAAAAAATAAATGTTTAGTTTTTAAACTATCTC
TTCTACAACAGAAACAATATAGTGAGAAGAGTGATCTTGTTTTACATTTTTGCAAATCTCTTTAAAAGTTAGCTTAA
GAGAAGGCAGCTGGTTCTTATATCTGTTTCTGCATTGAATGTGCTGTCATATCTCGCATCATGTAGCCTCTGAAAAA
CTCATAATAGAATGAGAGAGGAAAAAGTCAAATAACATCTTAGTATTATTACGAAAATAATTTGGACCTCACAGAAC
CACTGCATGGGTCTCAGGGACTCCCAGGGGTCCCCAGACCACATTTAAGGAAATACTGTTTCAGGGAATATAACTAT
TTTTGTACCTCCTGTGGCTATATTCTTTTAAAGAATAGTAACCTCTGTTTCTGAGGAACTTAGCTGCAATTATGTGC
AGAGTTTAAATAAGTGAAACGGAAATACCCTTTGCCTTTCTGCTCGAGTATGAAAGTGATGATCAAAATGTTCCCTT
TTCTCTCTCTCTCTCTCTCTCTCTCTCTCTCTCTCTCTCTCTCTCTCTCTCACTCTCTGGGGAACTTCGGGTTTCCG
TCTCTATATAATGTATTCATATTCCACTGGAAACATACATAGTTTGAGAAAACAGATGACATTTTTTCTGGGGGTGG
AAAGAATTACTACCACGAGGAATTCAAAATACAGACACAGTAATAAAAATCACCATAAAGCCCAGAGGGGAAAAAAA
TTGAGTAACAAAATAGGAGGTGAAATTATAAAACTGAGTAACAAAAAAGAGGTGAAATTATAAAATAAATGATAAAG
TTGGTTGTGGGTTAGGAAGAAAGAGAAATATAAAGAAACTGGCATAATGTAAAAGCCAAGACAAGAAAAGTGAGGCA
GAGGCATAGGTCTTTTGACTATTTTCCATGTTTGATTCTAAGGTAAGTAGATATAGTTTCTCATAGTTGGAAATGTT
CGTGAATTTAAACAGAATTAATGTTTATAATCAGATGCAATGTCTAGTTTTTCTATTTGTCCTGTGAAATAATAATT
GTGTAAAGTGCTCATGATTGTTTCAAGGGGTGAGGAGTAGTTCTAATTATCATAGATATTTTCATGACTTCGCATAC
CACTGGTTTATAGAGATTATACAGATTTTCTTATATCAGAACTCTCGTATCTTTAATTCCCTAGTAGATGTCTAAGA
AGGAGATTTATCACATAGCAGATGGTGGTAAACTTGAGTAAAGTGCCAGATACTAAATGCCTTTGGCTTTGTGGGCC
ATTCAATCTTTGCTGCAACTACTCAACTCTGCTATTGTAGCATGAAAGTAACCATAGACAATATGTAAATGAATGAG
TGTAGCTCTGTTCCAGTAAAACTTTATTTACAAAAACAGGTGGTGAGCACAACTTGGTTCATGAGCCATAGTTTACA
AACACTTGCTGTATAGCTTTCCCTGGTTGAATTTCGTTAATTTTATACAGAACCTGCCTCCCATACACACACACTTT
GTTCTTCATGGAAAATCTCCCCAGACTACTATGAAATAATGTTATTACTTGGAGATATACAATTAAGATGATGTCAT
TAGGAGATTATTAATATAGGAACTAAGCAAATACTATATGCTAAGTACTGAGGATAGGGTGCGATCACAATAGATAG
AAAATCTGCAATAGTTTGATGAACATGGGAAATTACAGTATTTCCTGTGATGGAAACATTATGAGGGGCTGTGGGAC
TACATAACAGGACCTGTGACCTATACCTGGGTTGGGGATGTCTAATTAATCAAGGAAAGCTTTGTAGAGGAAGTGAT
GTCTAACCTGAGATTGGAAAGGTCAACCTGGAGCTACCTAGATGAAGATGTATGGAAGGACATCCCAGGCAGAGGGA
ACATTGTATGATGAATCCTGATATGGATATAGTGCTGGATTTTAAGGAAGAGTAAGTTGTTCCATGAACTATACAGT
GCAAAGAAAGATGAAGAAATAGAAGTAGAGACCAGATCACAAAGGGCTTTTTGACCATGTTAGAGAAGTTATATTTT
ATCCCATTGGCACTAGGATGTTGTTGAGTATATGAGGACATGATCAGCAACATATTTTAGAAAGATCTCTTATTCTG
AAGTGTAAAGAGTGGATAAGAAGGAGACAAGGTAGGAGGCACGAGCTAATTAGAAAGCAGTCTCAGAGAGGCTGTTA
GAAATCAGAACAGAATGGCTATTATTAAAAAGTCAAAAAACAACAGATGATGGTGAGGCTTCAGAGAAAAGGGAATG
CTTATACACTGTTTATGGGAATGTAAATGAGTTTAGGCACTGTGGAGAGCAGTTTGAAAATTTCTCAAAGAACTTAA
AAGAGAGCTGCCATTCAACCCAGCAATCTCATTACTTGGTATATATTTAAAAGAACACGAATCTTTCTACCAAAGAG
ACACATGTACTCACATGTTCGTCGCAGCACTATACAGTAACAAAGACATGGAATCAACCTAGGTGCCCACCAGTGGT
GGATTGAATGAAATAAACGTGGTATACATGCACCATGGAATACTACACAGTCATAAAAAGCATACAGTCACGCCTTT
TGTAGGAACATGGATGCAGCTGGAGGTCATTATCCTAAGTGAATTAATGCAGGAACAGAAAACCGAAGATAGTTAGA
AGCTAAACATTGGGTACTCATTATAAAGGTGAAAACAATAGACATTGGGGACTACTAGAAGGGGGAGGAAGGAGAGG
GGCAAGGGTTGAAAAACTACCTATCGGGTACTATGCTCACTACCTGTGTGTGGTGGGATCATTTTTACCCTAAACCT
TGGCATCACACAACATACTCAGGTAACAAACCTGTACGTATACTACCTGGATCAAAAATAAAAGTTGAAATCAGAAT
GAGAAGGAGCGAAGGAGACAGCGACAGGAGGATGGAGAGAAGTGGGCAGATTCAAGAGAGATTTCTCAAGTGGACTT
ATGAGGACATGCTTATTGATACGCTCTGGGAGTGAGGGAGAGAGAAGAATCAAGGATGACTTCTACACTTTCAGCTT
AAAAAACCGGGAGCTGGTGGAGTCATCCATTGAACTTGACAGAGGAGCACGTTTAGGCAGGAAGATGATGGTGTTTG
AATGTCTGCGAAGGGAAAAACTGAACTGGGATTCAAATCAGAAAAAACGGTTTGAAGTCATACCCTCTTAATTGCAT
TTTCTATCGGATGGTAATGGCTTTGTGACAGGCTTTACTGATAGGTGATGTAACTCTGCCTCTGACAGATGAAGATC
CAAAGCATCCTCAGATTTTCCCGAAGCCTGTTTCAGCAACTGTGTAGACAGCACACACAAAAATCTGGGGGGAAGTC
CTAGGGCTCAGTTAGTTGATTGGATCTATTAAAGTAGCATTGGAGAACACAGTTCAGTCTGAGATTTCCCAAACATA
TTGCTCTATAATTTATTTTTACCCAGAAACTGAATTCGATGTGGGATAGGGATTATAAAAGCCTTCAGATTCCAGAT
AGAATCTCTGAATAGAAGGCTTTTGGGCCACATCTAGTAATCTCCTTTCCTCACTCCATTTCTGAACTTCTTGTTCA
CTTCTTCGCTGTTTTTAGGACGTTCTTACTACACTCCTGCCTCAAGGCCTTTGTACTTGTTTTCTCTGCTTAGGGCG
TTCTTTCCCGCAATATTTGCATGGCCTCCTCCCTCGCTTCTTTATTTCTATATTACCTATCTTTATTAAAGCTGCTA
TAAAAAAAAAAAAGCCCACACCTCAGTGGCTTAACATAATAGAAACTTTCCGTTCATGCAAACTTTACAAAAATTTT
CTGGTCAACAAGTAGATTTCCTCCAAATGGTGGATCAGGGGGGCCCAGGGCACTTCGCTTTTGTGGCTCTGATGTCT
TTAACATACGGATTTCAAAATCACTGTGCTCTTGTACATAAGAATGAAAAAGAACAAGGAATATTACATATGTGGTG
GTGGTTATTGGAGGTGGGGTTATGAGCCAGGCTTCATATTCATGAGCATCACTTTTGCTCACACTCCATTGGCTCGA
ACTCAGTCATGTAGCCAAACTAATGGCAAGGGAGACTGGGAAATGACAGCTAGCTGCACAATTAAGAGAAATGAGTA
GACTTGTCTAATGAGCAGCTAGCCAGTCCCTACCACGAGGACTTTGCTCAAATGTCTCCTTCTCCATGGAACCTTCT
ATGATCACCCTTTATAAAATCACAACTGCTCCCCATCTTCCCCTCAATATTTCCATCCCTTTTCCATGCTTCATTTT
TTTCCTCTGTAACACTTACTGTATCACAATCTATAGATTTTATTTCTTTATCTTGTTTACTGTCTGCCTCCCCTTCC
TCCCAATCGGATGTAAGGTCCATGAGGCAGGGATTGCTGCCGATATTCACGGCCATATCAATGGACACTAGTAGACC
CTCAATAAATGGCTGTTGCATTGTGATTACATATATGCTTCACCTAGAAGTAGTCTCATCTGGTGGCACATTTACTC
ATAGATTGACATTAATTCTCTATTGTTTTTTCCCCAGCAAAATTTGTCAAGGTAGTTTGTCAGTAGGGAGAAATAAA
GTTGTCAGGTGGCTCATCAAAAGTTCAATTTTGAGTACTCCTCCTGTGTACTCATAATGTTTTATAAATACTTTTAT
CTATGTAAGCACGTGGGCTTAGACACAATTCTAGGATTAAAACAGAAAGCTCTGTATCCATATTTTCCCTTTTTTGT
ACCTCCTTTTATGTTCTCTACCATTTTTTTTGAGTGCTGTTAGTGAAGCACTAGGCTAAATCTTGGGTTTCTGCAAA
AAAAACTTTAATCCTCACAACACTCTAAAATGTTTATTGTTCTAATTTTAAGACGAGGAAACTGAGGGCTAAAGAGA
TTAAGGAACTCGCCCGTGTTCACGTACTCAGCTGATAACTGGCAGCATTTAGATTTGGACTTACTTTCCATACAGAT
ATTCGCATTGCTAACCTTCAGGTTTTTCCCTCATCGTTTTCCACATCTACTCAAAAGTTGCTAATCATTTCCTTAAT
AGTGAGGCATAAATGACTGAGAAATCTTGATATATTATCCCCCTCAGGAGCACTTCATTCCGACAAGACACAAACTT
TAGGGAAAATGAACAAATGTCTACTTGTACAACTCAAGCACCAACCAGGTATGGTAGACATGTTGGCTTAAAAATAA
AGTTGATGCTTGGGTTCTGATTCTGATAATGACCTACGGAGGGTATGGCCTGAGGAGGTTACTAGGTGTGTGTAGAA
ATCAATGTTTTGTTTTGGTTTTCCCTCGGGAAGGGTCAACTTATACTTGAATCCTTCTGAAGTTTCTCAAATTACAA
GATGGTCATTTATTTTACTTCAATCAAAACAACAAAGTACTGTCCGGGAAAGATGTATTGCCTTGACTTATTCTCAA
TTTATGCTTATTTTGGAGGCTTGTAGAAGTAAACCTGATAGAGGAGGGCAAAAACACACACACACAGACACACACAC
ACTGGGAGAAAATAAATTTAACACAGTTTAGGGATTGACTTTGGTTGTATGACATCACAATTGCAAGAGTTGGATGC
CATTGTAAACAAGCTATGGAAAGAATACTGTTAAAAGTAACTCATTAAGTGGTTACATGGTGTAGCTCATGGACATA
TGGCACAGAAAAAAGATAAAGCTGTCTTTACATAACATAAAACTGTATTCTGTTATGTAAATGTGTGCTTGTGGCTT
GCAGTAAAATTCCTAGTGAAACATTACCTCTAGATTCAGCAGTACTATACCTCAGGCCACATGGATGTAAGTAAAGA
TGATGCCCTCTGGAAAACTGAGTTAGGCAACAACAAGTGCATCCATGAGGATGCAAATTTCAATGTTGAAGGTGCCT
GTGAAGAATTTGAACAAAATTGTTGCATGAAATATGAATGAAGAAGTGTGATCTAATGACATAATATTTTGTACTAT
ATAATTTTAAAGTAGTACACACAATCAAATTAATGAATTAAACATTATATGTAAACAGGTGATCATTGTATCTCCAT
TTTCTAAAGTTTCTATGTTAAAGGTGATCAAAAAACTTGGAGAGAGGGACTTCTCATTTGGAAAATGGGATAGTCAC
CTTTGGGTATGTGATGTATCAATCTCTAGAACTTCAGTTTCTTCATTGAAAGCATATAAAAGGCAATCCAAAGGATG
TATGGAATATTAAAAGATTCCACTGTGAAACTATCTAGCACTTTACCTGAAACACTTGTTAGATCCCCTCACCAAAA
TCATGCCATGTGATTTGGCAGTCTATTCCTCTTAGCGTAAGAGTAGCCCGACAGAAAATGTTCATTAAGAGTTAATG
TTAAATTCATTGAATTTAGCAACACATGAGTAGCGCTTCCTTTCTGATTATGCAAATCTCTCACCATCGTAATACGT
GCTTCCTTTAATTTCATTGGGAACATTTGTAATGTAAATGGTAACAGAGCCAATATTTCAAACAGAAGCCATTCTTT
CTAAAAAAAGCTAAATGTCTAAATGTATTGAAATGCTTCTAAAAGTAAAATATTTAGCACTTATTTGCAGATGGGTA
ATGTTAAATATCTCACTCATTATTATTACTACCACTTGTCTGAATAAATCCTCCCATAAGCATTAAGCAAGTAGGTA
AACAAAGAAATAACACTTCATGTGATGAATGCCAATATGAAGCACGTTTAAACTGTTCTGTCAAGAGACAAGCCTGG
AAATGCTAACTGTGTTTCTTTGCTTTTCTGCAATCATCTGAATACATAAATTCAAATTGCAGCTTTTAAAACTTCAA
ATCGAGGCTTTTGAAATTTCAGAAAACACATGCGCTTGGAAAAGCAGATTATAACAAGGTCCCAACGGGATTTTGTC
ACCATCTTTTTTATATTTCAAAGTATAAAAAAAATCTAGATAAGAAATGACTACCAAATGTTTTCATATTTAAAAGA
TGCTGTTTTTTTAAAAAATTAAATCACTGGAAAAAAAGTTTTCCACAAATATCGTGTAAAAAGAAAGACAGCAAAAA
GCTTAGCCAAAGCTTTTACTGTTTAAGTGATGATTTATTCTGAGAGTTCTTAAGAGTTTTCTAAATTAGTATATGGT
TAATATCCATAAAATCATATGCAAGATGCTGTCTTTCAAATTGATGCTGAAGGTTAATTATAAAATGTACTTAATTA
TTTATAGTGTCCCATTGAGTCCCAGATACTCTGTGTCCAAGAACACTGTAAATACAGAAAGTTTAGCAGAATTATAT
TGGAAAGGCAGTAATTCTTCACAAATTAACTTATTGATATAATGCAATCCCATTTAAAAATTTTCAGCGAGAATTGT
TTTATAATTTGACTGAATGATACATTACATAAGTTAGAATAACTAAAGTGGGAGAGCGGGTTAACCTACCAGAAATT
AAACATATTTTAAAGCTGCAATAATTGACATAGTGCATTACTGTCACAAAAATCTACAGTAGATCAACAAGCAGAAA
CTTAAAATATCATGAAGAAAGCACCATAAATCAATTCAGAAGAGATGGTGCTGGGGGAAAAAATATCAGTTTCTGAA
AAACTCTTCAAGGTTAGAAACAACACTATATAAATTTAAGATGGATTAAATATTTGGTTGTTCTTTTTTAACAAATG
AAAGAGTAAAGGATCAAGAATAAATGAGAATATCTGAACAATGGTAAAATGGCCACAATTTTAAGGATACTATCAAT
GAACATAATATCAAAGAAATAAACTGTTAAATTTTATTTAGAAAAAACTACTAAAAGGCAAAAAGGAAGCTGGAAAC
GTAGTCTCAATTAATCTATGTTTCAGATAATGTGAAAAGAGCTCTTAAAAATAGGAAAACACAGGAAAAATGGGCAA
CAGACATTGCCGATAATTGACAGTGGAAACTAAATAAATGACAAACATGTACACACATACAACATTTTCAACTTTCC
TATTAGTAGAATACTTAAAATATCTATGGCAAGCTTTTTATTTGTTTTATTGGTATATCAATTATAATGCTCAATAG
TGGCAAAAGTGTAGTGAGACAAGTATTTTGTAACTGTTGGTGGGAGTTTACGAGTGTTCTGAGTACCAACCTTGACA
GAAATTCAACAATGTGTATCTAAATCCTTAGGATTCCCATTGTTAACTTTTCATTCTCATTCCAGCAGATACATGAT
TCAAAATGTATAAATAAATGTGTTTATTGTAGGGTTATTCATTATAATAAAAAATGAAAGCAAACAAAATTCCTAAT
AACACAATAATGGTGAAATATAGGGTACCCCTATATATCTTATTACTAGGATCTTAAAAAATCAAGTTTTTAAAGCG
TAATTAATGACCTACAGAGACACATAGTAGAATAATAAATGAAGAAAATAAGCATACAATATAGGGTTTGAACCCAG
TAATACATATAAATCTCAACTATGATGAATAAGCACAACATCTCTCCTCTGTACTGGATATTCTTGATAGAAAAAAA
TATGCTAGTAAATAATTTGAGACATATTTGAAAAGAGGGGAGTGTTTGATTTAGAATTTTCTAAACTTGAGGGTTAT
TATTATTTTTTTGGTTTGATATTACTTTTTCCTGCTCCTTAAATTTTTGTTTGTTTGGGGGGTTTGGGGTTTTCTTT
TCCTTAAACGTGTCTGCTTCTAGATGAAAGTTGAAAATGTTTAAAAGCCTTGCCAATGTGTCTAGGTTTTTCAAATG
TAATCAGATTTTAGCAAGATTTTACTTAACTAAAAGTATTCAGAACACTGTGCAAAATCATCTGGAGTCAAATAGTA
ATGGAGGCAATGATTTGCAGAGTAGAAACAGAGAGAGAGAAAAAGATGAGATAGACCCTCAAAATCTAGACCCAAGG
AATTAAATCTGCTTGGAACATTTAAACAAATAAAGGATGCCTGTACTATACTAGACGTTTTCTTCTTCCACAATTGA
TTCTAAGGTCAGAATCTGAGGGGAAATGGTGCTGTTCCACATTCTAAAACAAACTGCCAGCAATCGAGACCAGCCAC
TTCCCCATAGGGTTTACTCTAAAGCAACAGGGATTATTATCTCTATTCCAAGCAATTTCCAATCTCCTCTGTACTCC
GTGTCCCAGGCAAGATTAAAAAGACTCAGGTAGGAAGGGGTAGTAAGCTTTGTGGGGAGTGCAGTTTGTGGTAAGGG
ACAGTTCCTTCTCTTTCATCTCTCTGAGTCAGAAGTAGAGACTTCGAGAGAATCACTGAGAGTAAGTATGTAGACTC
CAAGAAGGAAAAAGCATCCTCTCACTTCAATGAATGTTTGGAATCTGCAGACCTCCTTCCCAGGTCTGTGTAGCTTT
TGGAGAGGCCAGAAGAGCACCGTAGGCATTCCTTTGGCTTTCCATGGCCAAGCACATAGAGTAGAAGAAGAGGAGGA
ACCGTAAGGTTAACCATACATAAGAAATCAACAAAAGGCTTTGAAATTGACTTTTCCTATTTTTCAATTTAAATAAG
AGAGAATTGTCAATGATTAAAATTCATAAAACGAAGAAAGAATGGACTCAGAAAATAGCAAACATGAAATGTTAATT
ATTAGTTCAAAAGTTAGTTTACCGTGTTTTCTCTGCCAACTGATTGCTAATGACTAAAGTCCTTATTTCCAGCTTTC
CTCTCTCCCCGAGCTCCAGATCTCTTGATTTATTAAACTAGTAGTTTCCCCAAAATATATGAGACAACAAAATATAC
TCTCAGCTGAAGTAAATAGCATTCATCTTCCCAGTCAGATAAGGCAGAAGTACTTCTAGATCAGATGTTATATTCGG
GATAGGTTAAAAACAGACCCTGCTCCCAGTGTCCCAGGAATGAACAGTGGATGTGCTTATTTCTCATTGCATGCGTG
TATCAAAATATCTCACGTACCCTACAAGTACATACACTTACTATGTCCCTACAAAAATTAAAAACAATAAATCATAA
ACATTTGTAAAAATAAGCGAATAAATGTATAAATGAATTTAAAAGAGAATAGACAGAGGGGAGAATGTAACTTTACG
TGTCCCAGAACAGACTTTGAACAGGCTCTTATCATATAGGAAAACTGAATGAATATATGCAAGCATAAGTCCAATAA
CCAGATTCTGATTTACAGAATGATCGCAACTGTAGTTCTCTCAAGGCCCTGTCTTTGAACAGGCTGTGTCTTATTCC
TGCAACATGCTGATCTATCTTCATGCTTCAAGACTCAGATCATTATCTTCTCTGGGATGTCTCCCAAGCACTGCCCC
AGAAATAACTTCTCCTCCTATAATACTTAATCATAATCCTTGGCTTACATGCTTGTTTCTTCTCATTGACTATGAAA
TCCTCAAGACAAGGTATATAACGTATATATCTTTAATCCTAATGCCCAATTGAGCTCTTAGAAGGTAGTAAGCTCCC
AATACACATTTGTTAATTTGAAGCAAAAAAAAAAAAATAGCTAATCATTCAAAAAACTGAATTATCACAAATGTCCA
TCTAAAGTACTATATTTACACAATTAAATGCTATACAGCCAGGTTAATGAACAGACTAAAATTATATGCAACATGGA
TTATCGTAAACATAATTTTGAATGAAAAAGGCGAGACACAAAGGAGTATAAAGCCATACAATTCCATTTTCATAATA
TTCAGTACCGGCAAAATAATCAAAGTTGACAGGGTACTGGTTATACTTGGAGGCAGTGACTGCAAAGGGATAAGAGG
AGATTTCTGAGATTCTGATAATATTCTATTTCCTTCTCTGGTTGTACAGTGTGTTCAATTTTTAAAACACTATTGGG
CTATACAGTTAAATTGTGCAGTGTCCTGTACGTATATTACACTTCAGTTAAAAGCTTCCATGGAAGCTACACATAGT
TCCCAAAAGACAACAAAACAAAAAATTTTCAATTATTTTAAGCACAAACAATTTTGTTCAGCTGTCTTACAATCGAA
TATGTAAGAATAAATTTATGGCTAATTAGCATAGAGTTATATGCATTTTCATAATTAAAACTTCCACGAGTACAACA
TATGTTAAGTATTTTAAATCAGTTTTTCTCTTTCCTCAAATAAGGTTGTGAGTCATAATTCGGAAAACAGTTTAGCA
TGTAATAATTTAGTGTTTTATTTTAAACCAAGCTGAAGCCACATAAAGCAGAACTGCTCAACTGAGCCCTATCCAAA
TCCTTGACCCACAGAATAAGAAGCAGATAAAATGGCTGCTACTTAAACAAAACAAAAACCTTGTTTATATTTTTGTC
CTCTCATTTTCCATAAGTATACTTTAATTAAACATTTTAAAACTTGTAACTTTAGGTTATATACTTACTTTAGTTGG
TTCTCAACCAGGGACAATTTTGTCCCCACCCCCAACCCCCCAGCATATTTGGCAGTGCCTTGAAACATATTTGGTTG
TCACAGCTCAGGGGCGAGGTGTTACTACTGGTATCCAGTGTGTTCAACAGGCCAGGGATACTGCTAAATACCCTACA
ATGCAGAGGATAGCTGCTCACAGCAAAGAATTTTCCAAACCTAAATGTTAGTAATGCTAAAGTTGAGAAACCTTGCT
CAGATATAATGACATAATGTTGTTAGAATTTTTATTTTATTCATTTTAATGTATGTATGTATGTATGTATGTACGTA
CGTATGTATGTATGTATTTGAGATGGAGTCTTTCTCTGTTGCCCGGGGTGGAGTGCAGTGGCACGATCTCGGCTTAC
TGCAGCCTCTGCCTTCCACGTTCAAGTGATTCTCCTGCCTCAGCCTCCCTAGTAGCTGGGATTACAGGCGCCTGCCA
CCAAACCTGGCAAATTTTTGTATTTTTAGTGTAGACGGGGTTTCACCATATTTGCCAGGCTGGTCGCAAACTCCTGA
CCTCAAGTGATCCGCCCACATCGGCCTCCCTAAGCGCTAGGGTTACAGGCATGAGCCACTGCGCCTGGCCAGGAATT
TTTGAATCAGAATTTTTCTTGTTCGATTTTAATCTCTTATCATTTAGAGATTCTTGAAATATTGAAATTACTTTGTT
CAAAGTGAATGAATTTTCTTAAATTATGTATGGTTAACATCTTTTAAATTGCTTATTTTTAAATTGCCATGTTTGTG
TCCCAGTTTGCATTAACAAATAGTTTGAGAACTATGTTGGAAAAAAAAATAACAATTTTATTCTTCTTTCTCCAG
(SEQ ID NO: 967)
Homo sapiens dystrophin (DMD), intron 45 target sequence 1 (nucleotide
positions 1376272-1376321 of NCBI Reference Sequence: NG_012232.1)
GTAGGGCGACAGATCTAATAGGAATGAAAACATTTTAGCAGACTTTTTAA (SEQ ID NO: 968)
Homo sapiens dystrophin (DMD), intron 45 target sequence 2 (nucleotide
positions 1376339-1376383 of NCBI Reference Sequence: NG_012232.1)
ATTTCATGAGAGATTATAAGCAGGGTGAAAGGCACTAACATTAAA (SEQ ID NO: 969)
Homo sapiens dystrophin (DMD), intron 45 target sequence 3 (nucleotide
positions 1412133-1412382 of NCBI Reference Sequence: NG_012232.1)
CACTGCGCCTGGCCAGGAATTTTTGAATCAGAATTTTTCTTGTTCGATTTTAATCTCTTATCATTTAGAGATTCTTG
AAATATTGAAATTACTTTGTTCAAAGTGAATGAATTTTCTTAAATTATGTATGGTTAACATCTTTTAAATTGCTTAT
TTTTAAATTGCCATGTTTGTGTCCCAGTTTGCATTAACAAATAGTTTGAGAACTATGTTGGAAAAAAAAATAACAAT
TTTATTCTTCTTTCTCCAG (SEQ ID NO: 970)
Homo sapiens dystrophin (DMD) intron 45/exon 46 junction (nucleotide
positions 1412353-1412412 of NCBI Reference Sequence: NG_012232.1)
AAAATAACAATTTTATTCTTCTTTCTCCAGGCTAGAAGAACAAAAGAATATCTTGTCAGA (SEQ ID NO: 971)
Homo sapiens dystrophin (DMD), transcript variant Dp427m, exon 46
(nucleotide positions 6859-7006 of NCBI Reference Sequence: NM_004006.2; nucleotide
positions 1412383-1412530 of NCBI Reference Sequence: NG_012232.1)
GCTAGAAGAACAAAAGAATATCTTGTCAGAATTTCAAAGAGATTTAAATGAATTTGTTTTATGGTTGGAGGAAGCAG
ATAACATTGCTAGTATCCCACTTGAACCTGGAAAAGAGCAGCAACTAAAAGAAAAGCTTGAGCAAGTCAAG (SEQ
ID NO: 972)
Homo sapiens dystrophin (DMD), exon 46 target sequence 1 (nucleotide
positions 1412383-1412432 of NCBI Reference Sequence: NG_012232.1)
GCTAGAAGAACAAAAGAATATCTTGTCAGAATTTCAAAGAGATTTAAATG (SEQ ID NO: 973)

[0249] In some embodiments, an oligonucleotide useful for targeting DMD (e.g., for exon skipping) targets a splicing feature in a DMD sequence (e.g., a DMD pre-mRNA). In some embodiments, a splicing feature in a DMD sequence is an exonic splicing enhancer (ESE), a branch point, a splice donor site, or a splice acceptor site in a DMD sequence. In some embodiments, an ESE is in exon 45 of a DMD sequence (e.g., a DMD pre-mRNA). In some embodiments, a branch point is in intron 44 or intron 45 of a DMD sequence (e.g., a DMD pre-mRNA). In some embodiments, a splice donor site is across the junction of exon 44 and intron 44, in intron 44, across the junction of exon 45 and intron 45, or in intron 45 of a DMD sequence (e.g., a DMD pre-mRNA). In some embodiments, a splice acceptor site is in intron 44, across the junction of intron 44 and exon 45, in intron 45, or across the junction of intron 45 and exon 46 of a DMD sequence (e.g., a DMD pre-mRNA). In some embodiments, the oligonucleotide useful for targeting DMD promotes skipping of exon 45, such as by targeting a splicing feature (e.g., an ESE, a branch point, a splice donor site, or a splice acceptor site) in a DMD sequence (e.g., a DMD pre-mRNA). Examples of ESEs, branch points, splice donor sites, and splice acceptor sites are provided in Table 9.

[0250] In some embodiments, an oligonucleotide useful for targeting DMD (e.g., for exon skipping) targets an exonic splicing enhancer (ESE) in a DMD sequence. In some embodiments, an oligonucleotide useful for targeting DMD (e.g., for exon skipping) targets an ESE in DMD exon 45 (e.g., an ESE listed in Table 9).

[0251] In some embodiments, an oligonucleotide useful for targeting DMD (e.g., for exon skipping, such as for skipping exon 45) comprises a region of complementarity to a target sequence comprising one or more full or partial ESEs of a DMD transcript (e.g., one or more full or partial ESEs listed in Table 9). In some embodiments, the oligonucleotide comprises a region of complementarity to a target sequence comprising one or more full or partial ESEs of DMD exon 45. In some embodiments, the oligonucleotide comprises a region of complementarity to a target sequence comprising one or more full or partial ESEs as set forth in any one of SEQ ID NOs: 885-912. In some embodiments, the oligonucleotide comprises a region of complementarity to a target sequence comprising at least 4 (e.g., 4, 5, 6, 7, or 8) consecutive nucleotides of an ESE as set forth in any one of SEQ ID NOs: 885-912. In some embodiments, the oligonucleotide comprises at least 4 (e.g., 4, 5, 6, 7, or 8) consecutive nucleotides of an ESE antisense sequence as set forth in any one of SEQ ID NOs: 922-949.

[0252] In some embodiments, the oligonucleotide comprises a region of complementarity to a target sequence comprising at least 6 (e.g., 6, 7, 8, 9, 10, 11, 12, 13, 14, 15, 16, 17, 18, 19, 20, or more) nucleotides of one or more ESEs (e.g., 2, 3, 4, or more adjacent ESEs) of DMD exon 45. In some embodiments, the oligonucleotide comprises a region of complementarity to a target sequence comprising at least 6 (e.g., 6, 7, 8, 9, 10, 11, 12, 13, 14, 15, 16, 17, 18, 19, 20, or more) nucleotides of one or more ESEs (e.g., 2, 3, 4, or more adjacent ESEs) as set forth in any one of SEQ ID NOs: 885-912. In some embodiments, the oligonucleotide comprises at least 6 (e.g., 6, 7, 8, 9, 10, 11, 12, 13, 14, 15, 16, 17, 18, 19, 20, or more) nucleotides of one or more ESE antisense sequences (e.g., antisense sequences of 2, 3, 4, or more adjacent ESEs) as set forth in any one of SEQ ID NOs: 922-949.

[0253] In some embodiments, an oligonucleotide useful for targeting DMD (e.g., for exon skipping, such as for skipping exon 45) is 18-35 nucleotides in length, and comprises a region of complementarity to a target sequence comprising at least 4 (e.g., 4, 5, 6, 7, or 8) consecutive nucleotides of an ESE as set forth in any one of SEQ ID NOs: 885-912. In some embodiments, an oligonucleotide useful for targeting DMD (e.g., for exon skipping, such as for skipping exon 45) is 20-30 (e.g., 20, 25, 30) nucleotides in length, and comprises a region of complementarity to a target sequence comprising at least 4 (e.g., 4, 5, 6, 7, or 8) consecutive nucleotides of an ESE as set forth in any one of SEQ ID NOs: 885-912. In some embodiments, an oligonucleotide useful for targeting DMD (e.g., for exon skipping, such as for skipping exon 45) is 20-25 (i.e., 20, 21, 22, 23, 24, or 25) nucleotides in length, and comprises a region of complementarity to a target sequence comprising at least 4 (e.g., 4, 5, 6, 7, or 8) consecutive nucleotides of an ESE as set forth in any one of SEQ ID NOs: 885-912. In some embodiments, an oligonucleotide useful for targeting DMD (e.g., for exon skipping) is 30 nucleotides in length, and comprises a region of complementarity to a target sequence comprising at least 4 (e.g., 4, 5, 6, 7, or 8) consecutive nucleotides of an ESE as set forth in any one of SEQ ID NOs: 885-912.

[0254] In some embodiments, an oligonucleotide useful for targeting DMD (e.g., for exon skipping) targets a branch point in a DMD sequence. In some embodiments, an oligonucleotide useful for targeting DMD (e.g., for exon skipping) targets a branch point in DMD intron 44 or intron 45 (e.g., a branch point listed in Table 9).

[0255] In some embodiments, an oligonucleotide useful for targeting DMD (e.g., for exon skipping, such as for skipping exon 45) comprises a region of complementarity to a target sequence comprising a full or partial branch point of a DMD transcript (e.g., a full or partial branch point listed in Table 9). In some embodiments, the oligonucleotide comprises a region of complementarity to a target sequence comprising a full or partial branch point of DMD intron 44 or intron 45. In some embodiments, the oligonucleotide comprises a region of complementarity to a target sequence comprising a full or partial branch point as set forth in any one of SEQ ID NOs: 881, 882, and 914. In some embodiments, the oligonucleotide comprises a region of complementarity to a target sequence comprising at least 4 (e.g., 4, 5, 6, or 7) consecutive nucleotides of a branch point as set forth in any one of SEQ ID NOs: 881, 882, and 914. In some embodiments, the oligonucleotide comprises at least 4 (e.g., 4, 5, 6, or 7) consecutive nucleotides of a branch point antisense sequence as set forth in any one of SEQ ID NO: 918, 919, and 951.

[0256] In some embodiments, an oligonucleotide useful for targeting DMD (e.g., for exon skipping, such as for skipping exon 45) is 18-35 nucleotides in length, and comprises a region of complementarity to a target sequence comprising at least 4 (e.g., 4, 5, 6, or 7) consecutive nucleotides of a branch point as set forth in any one of SEQ ID NOs: 881, 882, and 914. In some embodiments, an oligonucleotide useful for targeting DMD (e.g., for exon skipping, such as for skipping exon 45) is 20-30 (e.g., 20, 25, 30) nucleotides in length, and comprises a region of complementarity to a target sequence comprising at least 4 (e.g., 4, 5, 6, or 7) consecutive nucleotides of a branch point as set forth in any one of SEQ ID NOs: 881, 882, and 914. In some embodiments, an oligonucleotide useful for targeting DMD (e.g., for exon skipping, such as for skipping exon 45) is 20-25 (i.e., 20, 21, 22, 23, 24, or 25) nucleotides in length, and comprises a region of complementarity to a target sequence comprising at least 4 (e.g., 4, 5, 6, or 7) consecutive nucleotides of a branch point as set forth in any one of SEQ ID NOs: 881, 882, and 914. In some embodiments, an oligonucleotide useful for targeting DMD (e.g., for exon skipping) is 30 nucleotides in length, and comprises a region of complementarity to a target sequence comprising at least 4 (e.g., 4, 5, 6, or 7) consecutive nucleotides of a branch point as set forth in any one of SEQ ID NOs: 881, 882, and 914.

[0257] In some embodiments, an oligonucleotide useful for targeting DMD (e.g., for exon skipping) targets a splice donor site in a DMD sequence. In some embodiments, an oligonucleotide useful for targeting DMD (e.g., for exon skipping) targets a splice donor site across the junction of exon 44 and intron 44, in intron 44, across the junction of exon 45 and intron 45, or in intron 45 (e.g., a splice donor site listed in Table 9).

[0258] In some embodiments, an oligonucleotide useful for targeting DMD (e.g., for exon skipping, such as for skipping exon 45) comprises a region of complementarity to a target sequence comprising a full or partial splice donor site of a DMD transcript (e.g., a full or partial splice donor site listed in Table 9). In some embodiments, the oligonucleotide comprises a region of complementarity to a target sequence comprising a full or partial splice donor site across the junction of exon 44 and intron 44, in intron 44, across the junction of exon 45 and intron 45, or in intron 45 of DMD. In some embodiments, the oligonucleotide comprises a region of complementarity to a target sequence comprising a full or partial splice donor site as set forth in SEQ ID NO: 880 or 913. In some embodiments, the oligonucleotide comprises a region of complementarity to a target sequence comprising at least 4 (e.g., 4, 5, 6, or 7) consecutive nucleotides of a splice donor site as set forth in SEQ ID NO: 880 or 913. In some embodiments, the oligonucleotide comprises at least 4 (e.g., 4, 5, 6, or 7) consecutive nucleotides of a splice donor site antisense sequence as set forth in SEQ ID NO: 917 or 950.

[0259] In some embodiments, an oligonucleotide useful for targeting DMD (e.g., for exon skipping, such as for skipping exon 45) is 18-35 nucleotides in length, and comprises a region of complementarity to a target sequence comprising at least 4 (e.g., 4, 5, 6, or 7) consecutive nucleotides of a splice donor site as set forth in SEQ ID NO: 880 or 913. In some embodiments, an oligonucleotide useful for targeting DMD (e.g., for exon skipping, such as for skipping exon 45) is 20-30 (e.g., 20, 25, 30) nucleotides in length, and comprises a region of complementarity to a target sequence comprising at least 4 (e.g., 4, 5, 6, or 7) consecutive nucleotides of a splice donor site as set forth in SEQ ID NO: 880 or 913. In some embodiments, an oligonucleotide useful for targeting DMD (e.g., for exon skipping, such as for skipping exon 45) is 20-25 (i.e., 20, 21, 22, 23, 24, or 25) nucleotides in length, and comprises a region of complementarity to a target sequence comprising at least 4 (e.g., 4, 5, 6, or 7) consecutive nucleotides of a splice donor site as set forth in SEQ ID NO: 880 or 913. In some embodiments, an oligonucleotide useful for targeting DMD (e.g., for exon skipping) is 30 nucleotides in length, and comprises a region of complementarity to a target sequence comprising at least 4 (e.g., 4, 5, 6, or 7) consecutive nucleotides of a splice donor site as set forth in SEQ ID NO: 880 or 913.

[0260] In some embodiments, an oligonucleotide useful for targeting DMD (e.g., for exon skipping) targets a splice acceptor site in a DMD sequence. In some embodiments, an oligonucleotide useful for targeting DMD (e.g., for exon skipping) targets a splice acceptor site in intron 44, across the junction of intron 44 and exon 45, in intron 45, or across the junction of intron 45 and exon 46 (e.g., a splice acceptor site listed in Table 9).

[0261] In some embodiments, an oligonucleotide useful for targeting DMD (e.g., for exon skipping, such as for skipping exon 45) comprises a region of complementarity to a target sequence comprising a full or partial splice acceptor site of a DMD transcript (e.g., a full or partial splice acceptor site listed in Table 9). In some embodiments, the oligonucleotide comprises a region of complementarity to a target sequence comprising a full or partial splice acceptor site in intron 44, across the junction of intron 44 and exon 45, in intron 45, or across the junction of intron 45 and exon 46 of DMD. In some embodiments, the oligonucleotide comprises a region of complementarity to a target sequence comprising a full or partial splice acceptor site as set forth in any one of SEQ ID NOs: 883, 884, 915, and 916. In some embodiments, the oligonucleotide comprises a region of complementarity to a target sequence comprising at least 4 (e.g., 4, 5, 6, 7, 8, 9, 10, 11, 12, 13, 14, 15, or 16) consecutive nucleotides of a splice acceptor site as set forth in any one of SEQ ID NOs: 883, 884, 915, and 916. In some embodiments, the oligonucleotide comprises at least 4 (e.g., 4, 5, 6, 7, 8, 9, 10, 11, 12, 13, 14, 15, or 16) consecutive nucleotides of a splice acceptor site antisense sequence as set forth in any one of SEQ ID NOs: 920, 921, 952, and 953.

[0262] In some embodiments, an oligonucleotide useful for targeting DMD (e.g., for exon skipping, such as for skipping exon 45) is 18-35 nucleotides in length, and comprises a region of complementarity to a target sequence comprising at least 4 (e.g., 4, 5, 6, 7, 8, 9, 10, 11, 12, 13, 14, 15, or 16) consecutive nucleotides of a splice acceptor site as set forth in any one of SEQ ID NOs: 883, 884, 915, and 916. In some embodiments, an oligonucleotide useful for targeting DMD (e.g., for exon skipping, such as for skipping exon 45) is 20-30 (e.g., 4, 5, 6, 7, 8, 9, 10, 11, 12, 13, 14, 15, or 16) nucleotides in length, and comprises a region of complementarity to a target sequence comprising at least 4 (e.g., 4, 5, 6, 7, 8, 9, 10, 11, 12, 13, 14, 15, or 16) consecutive nucleotides of a splice acceptor site as set forth in any one of SEQ ID NOs: 883, 884, 915, and 916. In some embodiments, an oligonucleotide useful for targeting DMD (e.g., for exon skipping, such as for skipping exon 45) is 20-25 (i.e., 20, 21, 22, 23, 24, or 25) nucleotides in length, and comprises a region of complementarity to a target sequence comprising at least 4 (e.g., 4, 5, 6, 7, 8, 9, 10, 11, 12, 13, 14, 15, or 16) consecutive nucleotides of a splice acceptor site as set forth in any one of SEQ ID NOs: 883, 884, 915, and 916. In some embodiments, an oligonucleotide useful for targeting DMD (e.g., for exon skipping) is 30 nucleotides in length, and comprises a region of complementarity to a target sequence comprising at least 4 (e.g., 4, 5, 6, 7, 8, 9, 10, 11, 12, 13, 14, 15, or 16) consecutive nucleotides of a splice acceptor site as set forth in any one of SEQ ID NOs: 883, 884, 915, and 916.

[0263] In some embodiments, an oligonucleotide useful for targeting DMD (e.g., for exon skipping) comprises a region of complementarity to a junction of an exon and an intron of a DMD RNA (e.g., any one of the exon/intron junctions provided by SEQ ID NOs: 957, 963, 966, and 971). In some embodiments, an oligonucleotide useful for targeting DMD (e.g., for exon skipping) comprises a region of complementarity to at least 10 (e.g., 10, 11, 12, 13, 14, 15, 16, 17, 18, 19, 20, 21, 22, 23, 24, 25, or more) consecutive nucleosides of a junction of an exon and an intron of a DMD RNA (e.g., any one of the exon/intron junctions provided by SEQ ID NOs: 957, 963, 966, and 971). In some embodiments, an oligonucleotide useful for targeting DMD (e.g., for exon skipping) is complementary to any one of SEQ ID NOs: 957, 963, 966, and 971.

[0264] In some embodiments, an oligonucleotide useful for targeting DMD (e.g., for exon skipping) comprises a region of complementarity to a target sequence of a DMD RNA (e.g., a target sequence provided by any one of SEQ ID NOs: 955, 956, 959-962, 964, 965, 968-970, and 973). In some embodiments, an oligonucleotide useful for targeting DMD (e.g., for exon skipping) comprises a region of complementarity to at least 10 (e.g., 10, 11, 12, 13, 14, 15, 16, 17, 18, 19, 20, 21, 22, 23, 24, 25, or more) consecutive nucleosides of a target sequence of a DMD RNA (e.g., a target sequence provided by any one of SEQ ID NOs: 955, 956, 959-962, 964, 965, 968-970, and 973). In some embodiments, an oligonucleotide useful for targeting DMD (e.g., for exon skipping) is complementary to any one of SEQ ID NOs: 955, 956, 959-962, 964, 965, 968-970, and 973.

TABLE 9
Example target sequence motifs

| | | SEQ | | SEQ | Motif |
|---|---|---|---|---|---|
| | | ID | Motif | ID | Antisense |
| Location in DMD | Type | NO: | Sequence^{†} | NO: | Sequence^{†} |
| Across exon 44/ | Splice Donor | 880 | AGGTAAG | 917 | CTTACCT |
| intron 45 junction | | | | | |
| Intron 44 | Branch Point | 881 | CCCTGAC | 918 | GTCAGGG |
| Intron 44 | Branch Point | 882 | GTCAG | 919 | CTGAC |
| Intron 44 | Splice Acceptor | 883 | ATCTTACAG | 920 | CTGTAAGAT |
| Exon 45 | Splice Acceptor | 884 | AACTCCAGG | 921 | CCTGGAGTT |
| Exon 45 | ESE | 885 | GAACTCCA | 922 | TGGAGTTC |
| Exon 45 | ESE | 886 | AACTCCAG | 923 | CTGGAGTT |
| Exon 45 | ESE | 887 | CTCCAGG | 924 | CCTGGAG |
| Exon 45 | ESE | 888 | CAGCGGC | 925 | GCCGCTG |
| Exon 45 | ESE | 889 | AGCGGC | 926 | GCCGCT |
| Exon 45 | ESE | 890 | TCAGAAC | 927 | GTTCTGA |
| Exon 45 | ESE | 891 | GAACATTG | 928 | CAATGTTC |
| Exon 45 | ESE | 892 | TGAATGC | 929 | GCATTCA |
| Exon 45 | ESE | 893 | GAATGCAA | 930 | TTGCATTC |
| Exon 45 | ESE | 894 | TGCAAC | 931 | GTTGCA |
| Exon 45 | ESE | 895 | CAACTGG | 932 | CCAGTTG |
| Exon 45 | ESE | 896 | CTGGGGA | 933 | TCCCCAG |
| Exon 45 | ESE | 897 | ATTCAGC | 934 | GCTGAAT |
| Exon 45 | ESE | 898 | TGCCAGTA | 935 | TACTGGCA |
| Exon 45 | ESE | 899 | GTATTCTA | 936 | TAGAATAC |
| Exon 45 | ESE | 900 | CTACAGG | 937 | CCTGTAG |
| Exon 45 | ESE | 901 | TACAGGA | 938 | TCCTGTA |
| Exon 45 | ESE | 902 | TGAATC | 939 | GATTCA |
| Exon 45 | ESE | 903 | CTGCGGT | 940 | ACCGCAG |
| Exon 45 | ESE | 904 | TGCGGT | 941 | ACCGCA |
| Exon 45 | ESE | 905 | CGGTGGC | 942 | GCCACCG |
| Exon 45 | ESE | 906 | TGGCAGG | 943 | CCTGCCA |
| Exon 45 | ESE | 907 | GGCAGGA | 944 | TCCTGCC |
| Exon 45 | ESE | 908 | AGGAGGT | 945 | ACCTCCT |
| Exon 45 | ESE | 909 | GGTCTGCA | 946 | TGCAGACC |
| Exon 45 | ESE | 910 | GTCTGCAA | 947 | TTGCAGAC |
| Exon 45 | ESE | 911 | CAGCTGT | 948 | ACAGCTG |
| Exon 45 | ESE | 912 | CAGACAG | 949 | CTGTCTG |
| Across exon 45/ | Splice Donor | 913 | AGGTAGG | 950 | CCTACCT |
| intron 45 junction | | | | | |
| Intron 45 | Branch Point | 914 | CATTAAC | 951 | GTTAATG |
| Across intron 45/ | Splice Acceptor | 915 | TTCTCCAGG | 952 | CCTGGAGAA |
| exon 46 junction | | | | | |
| Across intron 45/ | Splice Acceptor | 916 | TTCTTCTTTCTCC | 953 | CCTGGAGAAA |
| exon 46 junction | | | AGG | | GAAGAA |

^{†}Each thymine base (T) in any one of the sequences provided in Table 9 may independently and optionally be replaced with a uracil base (U). Motif sequences and antisense sequences listed in Table 9 contain T's, but binding of a motif sequence in RNA and/or DNA is contemplated.

[0265] In some embodiments, any one of the oligonucleotides useful for targeting DMD (e.g., for exon skipping) is a phosphorodiamidate morpholino oligomer (PMO).

[0266] In some embodiments, the oligonucleotide may have region of complementarity to a mutant DMD allele, for example, a DMD allele with at least one mutation in any of exons 1-79 of DMD in humans that leads to a frameshift and improper RNA splicing/processing.

[0267] In some embodiments, any one of the oligonucleotides can be in salt form, e.g., as sodium, potassium, or magnesium salts.

[0268] In some embodiments, the 5′ or 3′ nucleoside (e.g., terminal nucleoside) of any one of the oligonucleotides described herein is conjugated to an amine group, optionally via a spacer. In some embodiments, the spacer comprises an aliphatic moiety. In some embodiments, the spacer comprises a polyethylene glycol moiety. In some embodiments, a phosphodiester linkage is present between the spacer and the 5′ or 3′ nucleoside of the oligonucleotide. In some embodiments, the 5′ or 3′ nucleoside (e.g., terminal nucleoside) of any of the oligonucleotides described herein is conjugated to a spacer that is a substituted or unsubstituted aliphatic, substituted or unsubstituted heteroaliphatic, substituted or unsubstituted carbocyclylene, substituted or unsubstituted heterocyclylene, substituted or unsubstituted arylene, substituted or unsubstituted heteroarylene, —O—, —N(R^{A})—, —S—, —C(═O)—, —C(═O)O—, —C(═O)NR^{A}—, —NR^{A}C(═O)—, —NR^{A}C(═O)R^{A}—, —C(═O)R^{A}—, —NR^{A}C(═O)O—, —NR^{A}C(═O)N(R^{A})—, —OC(═O)—, —OC(═O)O—, —OC(═O)N(R^{A})—, —S(O)₂NR^{A}—, —NR^{A}S(O)₂—, or a combination thereof; each R^{A} is independently hydrogen or substituted or unsubstituted alkyl. In certain embodiments, the spacer is a substituted or unsubstituted alkylene, substituted or unsubstituted heterocyclylene, substituted or unsubstituted heteroarylene, —O—, —N(R^{A})—, or —C(═O)N(R^{A})₂, or a combination thereof.

[0269] In some embodiments, the 5′ or 3′ nucleoside of any one of the oligonucleotides described herein is conjugated to a compound of the formula —NH₂—(CH₂)ₙ—, wherein n is an integer from 1 to 12. In some embodiments, n is 6, 7, 8, 9, 10, 11, or 12. In some embodiments, a phosphodiester linkage is present between the compound of the formula NH₂—(CH₂)ₙ— and the 5′ or 3′ nucleoside of the oligonucleotide. In some embodiments, a compound of the formula NH₂—(CH₂)₆— is conjugated to the oligonucleotide via a reaction between 6-amino-1-hexanol (NH₂—(CH₂)₆—OH) and the 5′ phosphate of the oligonucleotide.

[0270] In some embodiments, the oligonucleotide is conjugated to a targeting agent, e.g., a muscle targeting agent such as an anti-TfR1 antibody, e.g., via the amine group.

### a. Oligonucleotide Size/Sequence

[0271] Oligonucleotides may be of a variety of different lengths, e.g., depending on the format. In some embodiments, an oligonucleotide is 7, 8, 9, 10, 11, 12, 13, 14, 15, 16, 17, 18, 19, 20, 21, 22, 23, 24, 25, 26, 27, 28, 29, 30, 35, 40, 45, 50, 75, or more nucleotides in length. In some embodiments, the oligonucleotide is 8 to 50 nucleotides in length, 8 to 40 nucleotides in length, 8 to 30 nucleotides in length, 10 to 15 nucleotides in length, 10 to 20 nucleotides in length, 15 to 25 nucleotides in length, 21 to 23 nucleotides in lengths, 20 to 25 nucleotides in length, etc.

[0272] In some embodiments, a nucleic acid sequence of an oligonucleotide for purposes of the present disclosure is “complementary” to a target nucleic acid when it is specifically hybridizable to the target nucleic acid. In some embodiments, an oligonucleotide hybridizing to a target nucleic acid (e.g., an mRNA or pre-mRNA molecule) results in modulation of activity or expression of the target (e.g., decreased mRNA translation, altered pre-mRNA splicing, exon skipping, target mRNA degradation, etc.). In some embodiments, a nucleic acid sequence of an oligonucleotide has a sufficient degree of complementarity to its target nucleic acid such that it does not hybridize non-target sequences under conditions in which avoidance of non-specific binding is desired, e.g., under physiological conditions. Thus, in some embodiments, an oligonucleotide may be at least 80%, at least 85%, at least 90%, at least 91%, at least 92%, at least 93%, at least 94%, at least 95%, at least 96%, at least 97%, at least 98%, at least 99% or 100% complementary to the consecutive nucleotides of a target nucleic acid. In some embodiments a complementary nucleotide sequence need not be 100% complementary to that of its target to be specifically hybridizable or specific for a target nucleic acid. In certain embodiments, oligonucleotides comprise one or more mismatched nucleobases relative to the target nucleic acid. In certain embodiments, activity relating to the target is reduced by such mismatch, but activity relating to a non-target is reduced by a greater amount (i.e., selectivity for the target nucleic acid is increased and off-target effects are decreased).

[0273] In some embodiments, an oligonucleotide comprises region of complementarity to a target nucleic acid that is in the range of 8 to 15, 8 to 30, 8 to 40, or 10 to 50, or 5 to 50, 15 to 20, 20 to 25, or 5 to 40 nucleotides in length. In some embodiments, a region of complementarity of an oligonucleotide to a target nucleic acid is 5, 6, 7, 8, 9, 10, 11, 12, 13, 14, 15, 16, 17, 18, 19, 20, 21, 22, 23, 24, 25, 26, 27, 28, 29, 30, 31, 32, 33, 34, 35, 36, 37, 38, 39, 40, 41, 42, 43, 44, 45, 46, 47, 48, 49, or 50 nucleotides in length. In some embodiments, the region of complementarity is complementary with at least 8 consecutive nucleotides of a target nucleic acid. In some embodiments, an oligonucleotide may contain 1, 2 or 3 base mismatches compared to the portion of the consecutive nucleotides of target nucleic acid. In some embodiments the oligonucleotide may have up to 3 mismatches over 15 bases, or up to 2 mismatches over 10 bases.

[0274] In some embodiments, the oligonucleotide is complementary (e.g., at least 85% at least 90%, at least 95%, or 100%) to a target sequence of the any one of the oligonucleotides described herein (e.g., the oligonucleotides listed in Table 8). In some embodiments, the oligonucleotide is complementary (e.g., at least 85% at least 90%, at least 95%, or 100%) to a target sequence of the any one of the oligonucleotides provided by SEQ ID NO: 400-879. In some embodiments, such target sequence is 100% complementary to an oligonucleotide listed in Table 8. In some embodiments, such target sequence is 100% complementary to an oligonucleotide provided by SEQ ID NO: 400-879. In some embodiments, the oligonucleotide is complementary (e.g., at least 85% at least 90%, at least 95%, or 100%) to a target sequence provided herein (e.g., a target sequence listed in Table 8). In some embodiments, the oligonucleotide is complementary (e.g., at least 85% at least 90%, at least 95%, or 100%) to any one of SEQ ID NO: 160-399.

[0275] In some embodiments, an oligonucleotide useful for targeting DMD (e.g., for exon skipping) comprises a region of complementarity to a target sequence of a DMD RNA (e.g., a target sequence provided by any one of SEQ ID NOs: 160-399). In some embodiments, an oligonucleotide useful for targeting DMD (e.g., for exon skipping) comprises a region of complementarity to at least 8 (e.g., 8, 9, 10, 11, 12, 13, 14, 15, 16, 17, 18, 19, 20, 21, 22, 23, 24, 25, or more) consecutive nucleosides of a target sequence of a DMD RNA (e.g., a target sequence provided by any one of SEQ ID NOs: 160-399). In some embodiments, an oligonucleotide useful for targeting DMD (e.g., for exon skipping) is complementary to any one of SEQ ID NOs: 160-399.

[0276] In some embodiments, an oligonucleotide useful for targeting DMD (e.g., for exon skipping) comprises a sequence comprising at least 8 (e.g., 8, 9, 10, 11, 12, 13, 14, 15, 16, 17, 18, 19, 20, 21, 22, 23, 24, 25, or more) consecutive nucleobases of a DMD-targeting sequence provided herein (e.g., an antisense sequence listed in Table 8). In some embodiments, the oligonucleotide comprises a sequence comprising at least 8 (e.g., 8, 9, 10, 11, 12, 13, 14, 15, 16, 17, 18, 19, 20, 21, 22, 23, 24, 25, or more) consecutive nucleobases of any one of SEQ ID NOs: 400-897. In some embodiments, the oligonucleotide comprises the sequence of any one of SEQ ID NOs: 400-897.

[0277] In some embodiments, an oligonucleotide useful for targeting DMD (e.g., for exon skipping) comprises a region of complementarity to a target sequence of a DMD RNA (e.g., a target sequence provided by any one of SEQ ID NOs: 240, 236, 280, 211, 197, 212, 208, 217, 213, and 195). In some embodiments, an oligonucleotide useful for targeting DMD (e.g., for exon skipping) comprises a region of complementarity to at least 8 (e.g., 8, 9, 10, 11, 12, 13, 14, 15, 16, 17, 18, 19, 20, 21, 22, 23, 24, 25, or more) consecutive nucleosides of a target sequence of a DMD RNA (e.g., a target sequence provided by any one of SEQ ID NOs: 240, 236, 280, 211, 197, 212, 208, 217, 213, and 195). In some embodiments, an oligonucleotide useful for targeting DMD (e.g., for exon skipping) is complementary to any one of SEQ ID NOs: 240, 236, 280, 211, 197, 212, 208, 217, 213, and 195.

[0278] In some embodiments, an oligonucleotide useful for targeting DMD (e.g., for exon skipping) comprises a sequence comprising at least 8 (e.g., 8, 9, 10, 11, 12, 13, 14, 15, 16, 17, 18, 19, 20, 21, 22, 23, 24, 25, or more) contiguous nucleobases of a DMD-targeting sequence provided herein (e.g., a sequence of any one of SEQ ID NOs: 720, 716, 760, 691, 677, 692, 688, 697, 693, and 675). In some embodiments, the oligonucleotide comprises at least 8 (e.g., 8, 9, 10, 11, 12, 13, 14, 15, 16, 17, 18, 19, 20, 21, 22, 23, 24, 25, or more) consecutive nucleosides of a DMD-targeting sequence provided herein (e.g., a sequence of any one of SEQ ID NOs: 720, 716, 760, 691, 677, 692, 688, 697, 693, and 675). In some embodiments, the oligonucleotide comprises the sequence of any one of SEQ ID NOs: 720, 716, 760, 691, 677, 692, 688, 697, 693, and 675.

[0279] In some embodiments, it should be appreciated that methylation of the nucleobase uracil at the C5 position forms thymine. Thus, in some embodiments, a nucleotide or nucleoside having a C5 methylated uracil (or 5-methyl-uracil) may be equivalently identified as a thymine nucleotide or nucleoside.

[0280] In some embodiments, any one or more of the thymine bases (T's) in any one of the oligonucleotides provided herein (e.g., the oligonucleotides listed in Table 8) may independently and optionally be uracil bases (U's), and/or any one or more of the U's in the oligonucleotides provided herein may independently and optionally be T's. In some embodiments, any one or more of the thymine bases (T's) in any one of the oligonucleotides provided by SEQ ID NOs: 640-879 or in an oligonucleotide complementary to any one of SEQ ID NOs: 160-399 may optionally be uracil bases (U's), and/or any one or more of the U's in the oligonucleotides may optionally be T's. In some embodiments, any one or more of the uracil bases (U's) in any one of the oligonucleotides provided by SEQ ID NOs: 400-639 or in an oligonucleotide complementary to any one of SEQ ID NOs: 160-399 may optionally be thymine bases (T's), and/or any one or more of the T's in the oligonucleotides may optionally be U's.

### b. Oligonucleotide Modifications

[0281] The oligonucleotides described herein may be modified, e.g., comprise a modified sugar moiety, a modified internucleoside linkage, a modified nucleotide or nucleoside and/or (e.g., and) combinations thereof. In addition, in some embodiments, oligonucleotides may exhibit one or more of the following properties: do not mediate alternative splicing; are not immune stimulatory; are nuclease resistant; have improved cell uptake compared to unmodified oligonucleotides; are not toxic to cells or mammals; have improved endosomal exit internally in a cell; minimizes TLR stimulation; or avoid pattern recognition receptors. Any of the modified chemistries or formats of oligonucleotides described herein can be combined with each other. For example, one, two, three, four, five, or more different types of modifications can be included within the same oligonucleotide.

[0282] In some embodiments, certain nucleotide or nucleoside modifications may be used that make an oligonucleotide into which they are incorporated more resistant to nuclease digestion than the native oligodeoxynucleotide or oligoribonucleotide molecules; these modified oligonucleotides survive intact for a longer time than unmodified oligonucleotides. Specific examples of modified oligonucleotides include those comprising modified backbones, for example, modified internucleoside linkages such as phosphorothioates, phosphotriesters, methyl phosphonates, short chain alkyl or cycloalkyl intersugar linkages or short chain heteroatomic or heterocyclic intersugar linkages. Accordingly, oligonucleotides of the disclosure can be stabilized against nucleolytic degradation such as by the incorporation of a modification, e.g., a nucleotide or nucleoside modification.

[0283] In some embodiments, an oligonucleotide may be of up to 50 or up to 100 nucleotides in length in which 2 to 10, 2 to 15, 2 to 16, 2 to 17, 2 to 18, 2 to 19, 2 to 20, 2 to 25, 2 to 30, 2 to 40, 2 to 45, or more nucleotides or nucleosides of the oligonucleotide are modified nucleotides/nucleosides. The oligonucleotide may be of 8 to 30 nucleotides in length in which 2 to 10, 2 to 15, 2 to 16, 2 to 17, 2 to 18, 2 to 19, 2 to 20, 2 to 25, 2 to 30 nucleotides or nucleosides of the oligonucleotide are modified nucleotides/nucleosides. The oligonucleotide may be of 8 to 15 nucleotides in length in which 2 to 4, 2 to 5, 2 to 6, 2 to 7, 2 to 8, 2 to 9, 2 to 10, 2 to 11, 2 to 12, 2 to 13, 2 to 14 nucleotides or nucleosides of the oligonucleotide are modified nucleotides/nucleosides. Optionally, the oligonucleotides may have every nucleotide or nucleoside except 1, 2, 3, 4, 5, 6, 7, 8, 9, or 10 nucleotides/nucleosides modified. Oligonucleotide modifications are described further herein.

### c. Modified Nucleosides

[0284] In some embodiments, the oligonucleotide described herein comprises at least one nucleoside modified at the 2′ position of the sugar. In some embodiments, an oligonucleotide comprises at least one 2′-modified nucleoside. In some embodiments, all of the nucleosides in the oligonucleotide are 2′-modified nucleosides.

[0285] In some embodiments, the oligonucleotide described herein comprises one or more non-bicyclic 2′-modified nucleosides, e.g., 2′-deoxy, 2′-fluoro (2′-F), 2′-O-methyl (2′-O-Mc), 2′-O-methoxyethyl (2′-MOE), 2′-O-aminopropyl (2′-O-AP), 2′-O-dimethylaminoethyl (2′-O-DMAOE), 2′-O-dimethylaminopropyl (2′-O-DMAP), 2′-O-dimethylaminoethyloxyethyl (2′-O-DMAEOE), or 2′-O—N-methylacetamido (2′-O-NMA) modified nucleoside.

[0286] In some embodiments, the oligonucleotide described herein comprises one or more 2′-4′ bicyclic nucleosides in which the ribose ring comprises a bridge moiety connecting two atoms in the ring, e.g., connecting the 2′-O atom to the 4′-C atom via a methylene (LNA) bridge, an ethylene (ENA) bridge, or a (S)-constrained ethyl (cEt) bridge. Examples of LNAs are described in International Patent Application Publication WO/2008/043753, published on Apr. 17, 2008, and entitled “RNA Antagonist Compounds For The Modulation Of PCSK9”, the contents of which are incorporated herein by reference in its entirety. Examples of ENAs are provided in International Patent Publication No. WO 2005/042777, published on May 12, 2005, and entitled “APP/ENA Antisense”; Morita et al., Nucleic Acid Res., Suppl 1:241-242, 2001; Surono et al., Hum. Gene Ther., 15:749-757, 2004; Koizumi, Curr. Opin. Mol. Ther., 8:144-149, 2006 and Horie et al., Nucleic Acids Symp. Ser (Oxf), 49:171-172, 2005; the disclosures of which are incorporated herein by reference in their entireties. Examples of cEt are provided in U.S. Pat. Nos. 7,101,993; 7,399,845 and 7,569,686, each of which is herein incorporated by reference in its entirety.

[0287] In some embodiments, the oligonucleotide comprises a modified nucleoside disclosed in one of the following United States Patent or Patent Application Publications: U.S. Pat. No. 7,399,845, issued on Jul. 15, 2008, and entitled “6-Modified Bicyclic Nucleic Acid Analogs”; U.S. Pat. No. 7,741,457, issued on Jun. 22, 2010, and entitled “6-Modified Bicyclic Nucleic Acid Analogs”; U.S. Pat. No. 8,022,193, issued on Sep. 20, 2011, and entitled “6-Modified Bicyclic Nucleic Acid Analogs”; U.S. Pat. No. 7,569,686, issued on Aug. 4, 2009, and entitled “Compounds And Methods For Synthesis Of Bicyclic Nucleic Acid Analogs”; U.S. Pat. No. 7,335,765, issued on Feb. 26, 2008, and entitled “Novel Nucleoside And Oligonucleotide Analogues”; U.S. Pat. No. 7,314,923, issued on Jan. 1, 2008, and entitled “Novel Nucleoside And Oligonucleotide Analogues”; U.S. Pat. No. 7,816,333, issued on Oct. 19, 2010, and entitled “Oligonucleotide Analogues And Methods Utilizing The Same” and US Publication Number 2011/0009471 now U.S. Pat. No. 8,957,201, issued on Feb. 17, 2015, and entitled “Oligonucleotide Analogues And Methods Utilizing The Same”, the entire contents of each of which are incorporated herein by reference for all purposes.

[0288] In some embodiments, the oligonucleotide comprises at least one modified nucleoside that results in an increase in Tm of the oligonucleotide in a range of 1ºC. 2° C., 3° ° C., 4° C., or 5° C. compared with an oligonucleotide that does not have the at least one modified nucleoside. The oligonucleotide may have a plurality of modified nucleosides that result in a total increase in Tm of the oligonucleotide in a range of 2° C. 3° C., 4° C., 5° C., 6° C., 7° C., 8° C., 9° ° C. 10° C. 15° ° C., 20° C., 25° C., 30° C., 35° C., 40° C., 45° C. or more compared with an oligonucleotide that does not have the modified nucleoside.

[0289] The oligonucleotide may comprise a mix of nucleosides of different kinds. For example, an oligonucleotide may comprise a mix of 2′-deoxyribonucleosides or ribonucleosides and 2′-fluoro modified nucleosides. An oligonucleotide may comprise a mix of deoxyribonucleosides or ribonucleosides and 2′-O-Me modified nucleosides. An oligonucleotide may comprise a mix of 2′-fluoro modified nucleosides and 2′-O-Me modified nucleosides. An oligonucleotide may comprise a mix of 2′-4′ bicyclic nucleosides and 2′-MOE, 2′-fluoro, or 2′-O-Me modified nucleosides. An oligonucleotide may comprise a mix of non-bicyclic 2′-modified nucleosides (e.g., 2′-MOE, 2′-fluoro, or 2′-O-Me) and 2′-4′ bicyclic nucleosides (e.g., LNA, ENA, cEt).

[0290] The oligonucleotide may comprise alternating nucleosides of different kinds. For example, an oligonucleotide may comprise alternating 2′-deoxyribonucleosides or ribonucleosides and 2′-fluoro modified nucleosides. An oligonucleotide may comprise alternating deoxyribonucleosides or ribonucleosides and 2′-O-Me modified nucleosides. An oligonucleotide may comprise alternating 2′-fluoro modified nucleosides and 2′-O-Me modified nucleosides. An oligonucleotide may comprise alternating 2′-4′ bicyclic nucleosides and 2′-MOE, 2′-fluoro, or 2′-O-Me modified nucleosides. An oligonucleotide may comprise alternating non-bicyclic 2′-modified nucleosides (e.g., 2′-MOE, 2′-fluoro, or 2′-O-Me) and 2′-4′ bicyclic nucleosides (e.g., LNA, ENA, cEt).

[0291] In some embodiments, an oligonucleotide described herein comprises a 5′-vinylphosphonate modification, one or more abasic residues, and/or one or more inverted abasic residues.

### d. Internucleoside Linkages/Backbones

[0292] In some embodiments, oligonucleotide may contain a phosphorothioate or other modified internucleoside linkage. In some embodiments, the oligonucleotide comprises phosphorothioate internucleoside linkages. In some embodiments, the oligonucleotide comprises phosphorothioate internucleoside linkages between at least two nucleosides. In some embodiments, the oligonucleotide comprises phosphorothioate internucleoside linkages between all nucleosides. For example, in some embodiments, oligonucleotides comprise modified internucleoside linkages at the first, second, and/or (e.g., and) third internucleoside linkage at the 5′ or 3′ end of the nucleotide sequence.

[0293] Phosphorus-containing linkages that may be used include, but are not limited to, phosphorothioates, chiral phosphorothioates, phosphorodithioates, phosphotriesters, aminoalkylphosphotriesters, methyl and other alkyl phosphonates comprising 3′alkylene phosphonates and chiral phosphonates, phosphinates, phosphoramidates comprising 3′-amino phosphoramidate and aminoalkylphosphoramidates, thionophosphoramidates, thionoalkylphosphonates, thionoalkylphosphotriesters, and boranophosphates having normal 3′-5′ linkages, 2′-5′ linked analogs of these, and those having inverted polarity wherein the adjacent pairs of nucleoside units are linked 3′-5′ to 5′-3′ or 2′-5′ to 5′-2′; sec U.S. Pat. Nos. 3,687,808; 4,469,863; 4,476,301; 5,023,243; 5,177,196; 5,188,897; 5,264,423; 5,276,019; 5,278,302; 5,286,717; 5,321,131; 5,399,676; 5,405,939; 5,453,496; 5,455, 233; 5,466,677; 5,476,925; 5,519,126; 5,536,821; 5,541,306; 5,550,111; 5,563, 253; 5,571,799; 5,587,361; and 5,625,050.

[0294] In some embodiments, oligonucleotides may have heteroatom backbones, such as methylene(methylimino) or MMI backbones; amide backbones (see De Mesmacker et al. Acc. Chem. Res. 1995, 28:366-374); morpholino backbones (see Summerton and Weller, U.S. Pat. No. 5,034,506); or peptide nucleic acid (PNA) backbones (wherein the phosphodiester backbone of the oligonucleotide is replaced with a polyamide backbone, the nucleotides being bound directly or indirectly to the aza nitrogen atoms of the polyamide backbone, see Nielsen et al., Science 1991, 254, 1497).

### e. Stereospecific Oligonucleotides

[0295] In some embodiments, internucleotidic phosphorus atoms of oligonucleotides are chiral, and the properties of the oligonucleotides by adjusted based on the configuration of the chiral phosphorus atoms. In some embodiments, appropriate methods may be used to synthesize P-chiral oligonucleotide analogs in a stereocontrolled manner (e.g., as described in Oka N, Wada T, Stercocontrolled synthesis of oligonucleotide analogs containing chiral internucleotidic phosphorus atoms. Chem Soc Rev. 2011 December; 40(12):5829-43.) In some embodiments, phosphorothioate containing oligonucleotides comprise nucleoside units that are joined together by cither substantially all Sp or substantially all Rp phosphorothioate intersugar linkages are provided. In some embodiments, such phosphorothioate oligonucleotides having substantially chirally pure intersugar linkages are prepared by enzymatic or chemical synthesis, as described, for example, in U.S. Pat. No. 5,587,261, issued on Dec. 12, 1996, the contents of which are incorporated herein by reference in their entirety. In some embodiments, chirally controlled oligonucleotides provide selective cleavage patterns of a target nucleic acid. For example, in some embodiments, a chirally controlled oligonucleotide provides single site cleavage within a complementary sequence of a nucleic acid, as described, for example, in US Patent Application Publication 20170037399 A1, published on Feb. 2, 2017, entitled “CHIRAL DESIGN”, the contents of which are incorporated herein by reference in their entirety.

### f. Morpholinos

[0296] In some embodiments, the oligonucleotide may be a morpholino-based compounds. Morpholino-based oligomeric compounds are described in Dwaine A. Braasch and David R. Corey, Biochemistry, 2002, 41(14), 4503-4510); Genesis, volume 30, issue 3, 2001; Heasman, J., Dev. Biol., 2002, 243, 209-214; Nasevicius et al., Nat. Genet., 2000, 26, 216-220; Lacerra et al., Proc. Natl. Acad. Sci., 2000, 97, 9591-9596; and U.S. Pat. No. 5,034,506, issued Jul. 23, 1991. In some embodiments, the morpholino-based oligomeric compound is a phosphorodiamidate morpholino oligomer (PMO) (e.g., as described in Iverson, Curr. Opin. Mol. Ther., 3:235-238, 2001; and Wang et al., J. Gene Med., 12:354-364, 2010; the disclosures of which are incorporated herein by reference in their entireties).

### g. Peptide Nucleic Acids (PNAs)

[0297] In some embodiments, both a sugar and an internucleoside linkage (the backbone) of the nucleotide units of an oligonucleotide are replaced with novel groups. In some embodiments, the base units are maintained for hybridization with an appropriate nucleic acid target compound. One such oligomeric compound, an oligonucleotide mimetic that has been shown to have excellent hybridization properties, is referred to as a peptide nucleic acid (PNA). In PNA compounds, the sugar-backbone of an oligonucleotide is replaced with an amide containing backbone, for example, an aminoethylglycine backbone. The nucleobases are retained and are bound directly or indirectly to aza nitrogen atoms of the amide portion of the backbone. Representative publication that report the preparation of PNA compounds include, but are not limited to, U.S. Pat. Nos. 5,539,082; 5,714,331; and 5,719,262, each of which is herein incorporated by reference. Further teaching of PNA compounds can be found in Nielsen et al., Science, 1991, 254, 1497-1500.

### h. Mixmers

[0298] In some embodiments, an oligonucleotide described herein may be a mixmer or comprise a mixmer sequence pattern. In general, mixmers are oligonucleotides that comprise both naturally and non-naturally occurring nucleosides or comprise two different types of non-naturally occurring nucleosides typically in an alternating pattern. Mixmers generally have higher binding affinity than unmodified oligonucleotides and may be used to specifically bind a target molecule, e.g., to block a binding site on the target molecule. Generally, mixmers do not recruit an RNase to the target molecule and thus do not promote cleavage of the target molecule. Such oligonucleotides that are incapable of recruiting RNase H have been described, for example, see WO2007/112754 or WO2007/112753.

[0299] In some embodiments, the mixmer comprises or consists of a repeating pattern of nucleoside analogues and naturally occurring nucleosides, or one type of nucleoside analogue and a second type of nucleoside analogue. However, a mixmer need not comprise a repeating pattern and may instead comprise any arrangement of modified nucleoside s and naturally occurring nucleoside s or any arrangement of one type of modified nucleoside and a second type of modified nucleoside. The repeating pattern, may, for instance be every second or every third nucleoside is a modified nucleoside, such as LNA, and the remaining nucleoside s are naturally occurring nucleosides, such as DNA, or are a 2′ substituted nucleoside analogue such as 2′-MOE or 2′ fluoro analogues, or any other modified nucleoside described herein. It is recognized that the repeating pattern of modified nucleoside, such as LNA units, may be combined with modified nucleoside at fixed positions—e.g. at the 5′ or 3′ termini.

[0300] In some embodiments, a mixmer does not comprise a region of more than 5, more than 4, more than 3, or more than 2 consecutive naturally occurring nucleosides, such as DNA nucleosides. In some embodiments, the mixmer comprises at least a region consisting of at least two consecutive modified nucleosides, such as at least two consecutive LNAs. In some embodiments, the mixmer comprises at least a region consisting of at least three consecutive modified nucleoside units, such as at least three consecutive LNAs.

[0301] In some embodiments, the mixmer does not comprise a region of more than 7, more than 6, more than 5, more than 4, more than 3, or more than 2 consecutive nucleoside analogues, such as LNAs. In some embodiments, LNA units may be replaced with other nucleoside analogues, such as those referred to herein.

[0302] Mixmers may be designed to comprise a mixture of affinity enhancing modified nucleosides, such as in non-limiting example LNA nucleosides and 2′-O-Me nucleosides. In some embodiments, a mixmer comprises modified internucleoside linkages (e.g., phosphorothioate internucleoside linkages or other linkages) between at least two, at least three, at least four, at least five or more nucleosides.

[0303] A mixmer may be produced using any suitable method. Representative U.S. patents, U.S. patent publications, and PCT publications that teach the preparation of mixmers include U.S. patent publication Nos. US20060128646, US20090209748, US20090298916, US20110077288, and US20120322851, and U.S. Pat. No. 7,687,617.

[0304] In some embodiments, a mixmer comprises one or more morpholino nucleosides. For example, in some embodiments, a mixmer may comprise morpholino nucleosides mixed (e.g., in an alternating manner) with one or more other nucleosides (e.g., DNA, RNA nucleosides) or modified nucleosides (e.g., LNA, 2′-O-Me nucleosides).

[0305] In some embodiments, mixmers are useful for splice correcting or exon skipping, for example, as reported in Touznik A., et al., LNA/DNA mixmer-based antisense oligonucleotides correct alternative splicing of the SMN2 gene and restore SMN protein expression in type I SMA fibroblasts Scientific Reports, volume 7, Article number: 3672 (2017), Chen S. et al., Synthesis of a Morpholino Nucleic Acid (MNA)-Uridine Phosphoramidite, and Exon Skipping Using MNA/2′-O-Methyl Mixmer Antisense Oligonucleotide, Molecules 2016, 21, 1582, the contents of each which are incorporated herein by reference.

### i. Multimers

[0306] In some embodiments, molecular payloads may comprise multimers (e.g., concatemers) of 2 or more oligonucleotides connected by a linker. In this way, in some embodiments, the oligonucleotide loading of a complex can be increased beyond the available linking sites on a targeting agent (e.g., available thiol sites on an antibody) or otherwise tuned to achieve a particular payload loading content. Oligonucleotides in a multimer can be the same or different (e.g., targeting different genes or different sites on the same gene or products thereof).

[0307] In some embodiments, multimers comprise 2 or more oligonucleotides linked together by a cleavable linker. However, in some embodiments, multimers comprise 2 or more oligonucleotides linked together by a non-cleavable linker. In some embodiments, a multimer comprises 2, 3, 4, 5, 6, 7, 8, 9, 10 or more oligonucleotides linked together. In some embodiments, a multimer comprises 2 to 5, 2 to 10 or 4 to 20 oligonucleotides linked together.

[0308] In some embodiments, a multimer comprises 2 or more oligonucleotides linked end-to-end (in a linear arrangement). In some embodiments, a multimer comprises 2 or more oligonucleotides linked end-to-end via an oligonucleotide based linker (e.g., poly-dT linker, an abasic linker). In some embodiments, a multimer comprises a 5′ end of one oligonucleotide linked to a 3′ end of another oligonucleotide. In some embodiments, a multimer comprises a 3′ end of one oligonucleotide linked to a 3′ end of another oligonucleotide. In some embodiments, a multimer comprises a 5′ end of one oligonucleotide linked to a 5′ end of another oligonucleotide. Still, in some embodiments, multimers can comprise a branched structure comprising multiple oligonucleotides linked together by a branching linker.

[0309] Further examples of multimers that may be used in the complexes provided herein are disclosed, for example, in US Patent Application Number 2015/0315588 A1, entitled Methods of delivering multiple targeting oligonucleotides to a cell using cleavable linkers, which was published on Nov. 5, 2015; US Patent Application Number 2015/0247141 A1, entitled Multimeric Oligonucleotide Compounds, which was published on Sep. 3, 2015, US Patent Application Number US 2011/0158937 A1, entitled Immunostimulatory Oligonucleotide Multimers, which was published on Jun. 30, 2011; and U.S. Pat. No. 5,693,773, entitled Triplex-Forming Antisense Oligonucleotides Having Abasic Linkers Targeting Nucleic Acids Comprising Mixed Sequences Of Purines And Pyrimidines, which issued on Dec. 2, 1997, the contents of each of which are incorporated herein by reference in their entireties.

### C. Linkers

[0310] Complexes described herein generally comprise a linker that covalently links any one of the anti-TfR1 antibodies described herein to a molecular payload. A linker comprises at least one covalent bond. In some embodiments, a linker may be a single bond, e.g., a disulfide bond or disulfide bridge, that covalently links an anti-TfR1 antibody to a molecular payload. However, in some embodiments, a linker may covalently link any one of the anti-TfR1 antibodies described herein to a molecular payload through multiple covalent bonds. In some embodiments, a linker may be a cleavable linker. However, in some embodiments, a linker may be a non-cleavable linker. A linker is typically stable in vitro and in vivo, and may be stable in certain cellular environments. Additionally, typically a linker does not negatively impact the functional properties of either the anti-TfR1 antibody or the molecular payload. Examples and methods of synthesis of linkers are known in the art (see, e.g. Kline, T. et al. “Methods to Make Homogenous Antibody Drug Conjugates.” Pharmaceutical Research, 2015, 32:11, 3480-3493; Jain, N. et al. “Current ADC Linker Chemistry” Pharm Res. 2015, 32:11, 3526-3540; McCombs, J. R. and Owen, S. C. “Antibody Drug Conjugates: Design and Selection of Linker, Payload and Conjugation Chemistry” AAPS J. 2015, 17:2, 339-351).

[0311] A linker typically will contain two different reactive species that allow for attachment to both the anti-TfR1 antibody and a molecular payload. In some embodiments, the two different reactive species may be a nucleophile and/or an electrophile. In some embodiments, a linker contains two different electrophiles or nucleophiles that are specific for two different nucleophiles or electrophiles. In some embodiments, a linker is covalently linked to an anti-TfR1 antibody via conjugation to a lysine residue or a cysteine residue of the anti-TfR1 antibody. In some embodiments, a linker is covalently linked to a cysteine residue of an anti-TfR1 antibody via a maleimide-containing linker, wherein optionally the maleimide-containing linker comprises a maleimidocaproyl or maleimidomethyl cyclohexane-1-carboxylate group. In some embodiments, a linker is covalently linked to a cysteine residue of an anti-TfR1 antibody or thiol functionalized molecular payload via a 3-arylpropionitrile functional group. In some embodiments, a linker is covalently linked to a lysine residue of an anti-TfR1 antibody. In some embodiments, a linker is covalently linked to an anti-TfR1 antibody and/or (e.g., and) a molecular payload, independently, via an amide bond, a carbamate bond, a hydrazide, a triazole, a thioether, and/or a disulfide bond.

i. Cleavable Linkers

[0312] A cleavable linker may be a protease-sensitive linker, a pH-sensitive linker, or a glutathione-sensitive linker. These linkers are typically cleavable only intracellularly and are preferably stable in extracellular environments, e.g., extracellular to a muscle cell.

[0313] Protease-sensitive linkers are cleavable by protease enzymatic activity. These linkers typically comprise peptide sequences and may be 2-10 amino acids, about 2-5 amino acids, about 5-10 amino acids, about 10 amino acids, about 5 amino acids, about 3 amino acids, or about 2 amino acids in length. In some embodiments, a peptide sequence may comprise naturally-occurring amino acids, e.g. cysteine, alanine, or non-naturally-occurring or modified amino acids. Non-naturally occurring amino acids include ß-amino acids, homo-amino acids, proline derivatives, 3-substituted alanine derivatives, linear core amino acids, N-methyl amino acids, and others known in the art. In some embodiments, a protease-sensitive linker comprises a valine-citrulline or alanine-citrulline sequence. In some embodiments, a protease-sensitive linker can be cleaved by a lysosomal protease, e.g. cathepsin B, and/or (e.g., and) an endosomal protease.

[0314] A pH-sensitive linker is a covalent linkage that readily degrades in high or low pH environments. In some embodiments, a pH-sensitive linker may be cleaved at a pH in a range of 4 to 6. In some embodiments, a pH-sensitive linker comprises a hydrazone or cyclic acetal. In some embodiments, a pH-sensitive linker is cleaved within an endosome or a lysosome.

[0315] In some embodiments, a glutathione-sensitive linker comprises a disulfide moiety. In some embodiments, a glutathione-sensitive linker is cleaved by a disulfide exchange reaction with a glutathione species inside a cell. In some embodiments, the disulfide moiety further comprises at least one amino acid, e.g., a cysteine residue.

[0316] In some embodiments, a linker comprises a valine-citrulline sequence (e.g., as described in U.S. Pat. No. 6,214,345, incorporated herein by reference). In some embodiments, before conjugation, a linker comprises a structure of:

[chemical structure]

[0317] In some embodiments, after conjugation, a linker comprises a structure of:

[chemical structure]

[0318] In some embodiments, before conjugation, a linker comprises a structure of:

[chemical structure]

[0319] wherein n is any number from 0-10. In some embodiments, n is 3.

[0320] In some embodiments, a linker comprises a structure of:

[chemical structure]

[0321] wherein n is any number from 0-10, wherein m is any number from 0-10. In some embodiments, n is 3 and/or (e.g., and) m is 4.

[0322] In some embodiments, a linker comprises a structure of:

[chemical structure]

[0323] wherein n is any number from 0-10, wherein m is any number from 0-10. In some embodiments, n is 3 and/or (e.g., and) m is 4.
   ii. Non-Cleavable Linkers

[0324] In some embodiments, non-cleavable linkers may be used. Generally, a non-cleavable linker cannot be readily degraded in a cellular or physiological environment. In some embodiments, a non-cleavable linker comprises an optionally substituted alkyl group, wherein the substitutions may include halogens, hydroxyl groups, oxygen species, and other common substitutions. In some embodiments, a linker may comprise an optionally substituted alkyl, an optionally substituted alkylene, an optionally substituted arylene, a heteroarylene, a peptide sequence comprising at least one non-natural amino acid, a truncated glycan, a sugar or sugars that cannot be enzymatically degraded, an azide, an alkyne-azide, a peptide sequence comprising a LPXT sequence, a thioether, a biotin, a biphenyl, repeating units of polyethylene glycol or equivalent compounds, acid esters, acid amides, sulfamides, and/or an alkoxy-amine linker. In some embodiments, sortase-mediated ligation can be utilized to covalently link an anti-TfR1 antibody comprising a LPXT sequence to a molecular payload comprising a (G), sequence (see, e.g. Proft T. Sortase-mediated protein ligation: an emerging biotechnology tool for protein modification and immobilization. Biotechnol Lett. 2010, 32(1):1-10).

[0325] In some embodiments, a linker may comprise a substituted alkylene, an optionally substituted alkenylene, an optionally substituted alkynylene, an optionally substituted cycloalkylene, an optionally substituted cycloalkenylene, an optionally substituted arylene, an optionally substituted heteroarylene further comprising at least one heteroatom selected from N. O, and S; an optionally substituted heterocyclylene further comprising at least one heteroatom selected from N, O, and S, an imino, an optionally substituted nitrogen species, an optionally substituted oxygen species O, an optionally substituted sulfur species, or a poly(alkylene oxide), e.g. polyethylene oxide or polypropylene oxide. In some embodiments, a linker may be a non-cleavable N-gamma-maleimidobutyryl-oxysuccinimide ester (GMBS) linker.

iii. Linker Conjugation

[0326] In some embodiments, a linker is covalently linked to an anti-TfR1 antibody and/or (e.g., and) molecular payload via a phosphate, thioether, ether, carbon-carbon, carbamate, or amide bond. In some embodiments, a linker is covalently linked to an oligonucleotide through a phosphate or phosphorothioate group, e.g. a terminal phosphate of an oligonucleotide backbone. In some embodiments, a linker is covalently linked to an anti-TfR1 antibody, through a lysine or cysteine residue present on the anti-TfR1 antibody.

[0327] In some embodiments, a linker, or a portion thereof is covalently linked to an anti-TfR1 antibody and/or (e.g., and) molecular payload by a cycloaddition reaction between an azide and an alkyne to form a triazole, wherein the azide or the alkyne may be located on the anti-TfR1 antibody, molecular payload, or the linker. In some embodiments, an alkyne may be a cyclic alkyne, e.g., a cyclooctyne. In some embodiments, an alkyne may be bicyclononyne (also known as bicyclo[6.1.0]nonyne or BCN) or substituted bicyclononyne. In some embodiments, a cyclooctyne is as described in International Patent Application Publication WO2011136645, published on Nov. 3, 2011, entitled, “Fused Cyclooctyne Compounds And Their Use In Metal-free Click Reactions”. In some embodiments, an azide may be a sugar or carbohydrate molecule that comprises an azide. In some embodiments, an azide may be 6-azido-6-deoxygalactose or 6-azido-N-acetylgalactosamine. In some embodiments, a sugar or carbohydrate molecule that comprises an azide is as described in International Patent Application Publication WO2016170186, published on Oct. 27, 2016, entitled, “Process For The Modification Of A Glycoprotein Using A Glycosyltransferase That Is Or Is Derived From A β(1,4)-N-Acetylgalactosaminyltransferase”. In some embodiments, a cycloaddition reaction between an azide and an alkyne to form a triazole, wherein the azide or the alkyne may be located on the anti-TfR1 antibody, molecular payload, or the linker is as described in International Patent Application Publication WO2014065661, published on May 1, 2014, entitled, “Modified antibody, antibody-conjugate and process for the preparation thereof”; or International Patent Application Publication WO2016170186, published on Oct. 27, 2016, entitled, “Process For The Modification Of A Glycoprotein Using A Glycosyltransferase That Is Or Is Derived From A β(1,4)-N-Acetylgalactosaminyltransferase”.

[0328] In some embodiments, a linker comprises a spacer, e.g., a polyethylene glycol spacer or an acyl/carbomoyl sulfamide spacer, e.g., a HydraSpace™ spacer. In some embodiments, a spacer is as described in Verkade, J. M. M. et al., “A Polar Sulfamide Spacer Significantly Enhances the Manufacturability, Stability, and Therapeutic Index of Antibody-Drug Conjugates”, Antibodies, 2018, 7, 12.

[0329] In some embodiments, a linker is covalently linked to an anti-TfR1 antibody and/or (e.g., and) molecular payload by the Diels-Alder reaction between a dienophile and a diene/hetero-diene, wherein the dienophile or the diene/hetero-diene may be located on the anti-TfR1 antibody, molecular payload, or the linker. In some embodiments a linker is covalently linked to an anti-TfR1 antibody and/or (e.g., and) molecular payload by other pericyclic reactions such as an ene reaction. In some embodiments, a linker is covalently linked to an anti-TfR1 antibody and/or (e.g., and) molecular payload by an amide, thioamide, or sulfonamide bond reaction. In some embodiments, a linker is covalently linked to an anti-TfR1 antibody and/or (e.g., and) molecular payload by a condensation reaction to form an oxime, hydrazone, or semicarbazide group existing between the linker and the anti-TfR1 antibody and/or (e.g., and) molecular payload.

[0330] In some embodiments, a linker is covalently linked to an anti-TfR1 antibody and/or (e.g., and) molecular payload by a conjugate addition reaction between a nucleophile, e.g. an amine or a hydroxyl group, and an electrophile, e.g. a carboxylic acid, carbonate, or an aldehyde. In some embodiments, a nucleophile may exist on a linker and an electrophile may exist on an anti-TfR1 antibody or molecular payload prior to a reaction between a linker and an anti-TfR1 antibody or molecular payload. In some embodiments, an electrophile may exist on a linker and a nucleophile may exist on an anti-TfR1 antibody or molecular payload prior to a reaction between a linker and an anti-TfR1 antibody or molecular payload. In some embodiments, an electrophile may be an azide, pentafluorophenyl, a silicon centers, a carbonyl, a carboxylic acid, an anhydride, an isocyanate, a thioisocyanate, a succinimidyl ester, a sulfosuccinimidyl ester, a maleimide, an alkyl halide, an alkyl pseudohalide, an epoxide, an episulfide, an aziridine, an aryl, an activated phosphorus center, and/or an activated sulfur center. In some embodiments, a nucleophile may be an optionally substituted alkene, an optionally substituted alkyne, an optionally substituted aryl, an optionally substituted heterocyclyl, a hydroxyl group, an amino group, an alkylamino group, an anilido group, and/or a thiol group.

[0331] In some embodiments, a linker comprises a valine-citrulline sequence covalently linked to a reactive chemical moiety (e.g., an azide moiety or a BCN moiety for click chemistry). In some embodiments, a linker comprising a valine-citrulline sequence covalently linked to a reactive chemical moiety (e.g., an azide moiety for click chemistry) comprises a structure of:

[chemical structure]

[0332] wherein n is any number from 0-10. In some embodiments, n is 3.

[0333] In some embodiments, a linker comprising the structure of Formula (A) is covalently linked (e.g., optionally via additional chemical moieties) to a molecular payload (e.g., an oligonucleotide). In some embodiments, a linker comprising the structure of Formula (A) is covalently linked to an oligonucleotide, e.g., through a nucleophilic substitution with amine-L1-oligonucleotides forming a carbamate bond, yielding a compound comprising a structure of:

[chemical structure]

[0334] wherein n is any number from 0-10. In some embodiments, n is 3.

[0335] In some embodiments, the compound of Formula (B) is further covalently linked via a triazole to additional moieties, wherein the triazole is formed by a click reaction between the azide of Formula (A) or Formula (B) and an alkyne provided on a bicyclononyne. In some embodiments, a compound comprising a bicyclononyne comprises a structure of:

[chemical structure]

[0336] wherein m is any number from 0-10. In some embodiments, m is 4.

[0337] In some embodiments, the azide of the compound of structure (B) forms a triazole via a click reaction with the alkyne of the compound of structure (C), forming a compound comprising a structure of:

[chemical structure]

[0338] wherein n is any number from 0-10, and wherein m is any number from 0-10. In some embodiments, n is 3 and m is 4.

[0339] In some embodiments, the compound of structure (D) is further covalently linked to a lysine of the anti-TfR1 antibody, forming a complex comprising a structure of:

[chemical structure]

[0340] wherein n is any number from 0-10, wherein m is any number from 0-10. In some embodiments, n is 3 and/or (e.g., and) m is 4. It should be understood that the amide shown adjacent the anti-TfR1 antibody in Formula (E) results from a reaction with an amine of the anti-TfR1 antibody, such as a lysine epsilon amine.

[0341] In some embodiments, the compound of Formula (C) is further covalently linked to a lysine of the anti-TfR1 antibody, forming a compound comprising a structure of:

[chemical structure]

[0342] wherein m is 0-15 (e.g., 4). It should be understood that the amide shown adjacent the anti-TfR1 antibody in Formula (F) results from a reaction with an amine of the anti-TfR1 antibody, such as a lysine epsilon amine.

[0343] In some embodiments, the azide of the compound of structure (B) forms a triazole via a click reaction with the alkyne of the compound of structure (F), forming a complex comprising a structure of:

[chemical structure]

[0344] wherein n is any number from 0-10, wherein m is any number from 0-10. In some embodiments, n is 3 and/or (e.g., and) m is 4. It should be understood that the amide shown adjacent the anti-TfR1 antibody in Formula (E) results from a reaction with an amine of the anti-TfR1 antibody, such as a lysine epsilon amine.

[0345] In some embodiments, the azide of the compound of structure (A) forms a triazole via a click reaction with the alkyne of the compound of structure (F), forming a compound comprising a structure of:

[chemical structure]

[0346] wherein n is any number from 0-10, wherein m is any number from 0-10. In some embodiments, n is 3 and/or (e.g., and) m is 4. In some embodiments, an oligonucleotide is covalently linked to a compound comprising a structure of formula (G), thereby forming a complex comprising a structure of formula (E). It should be understood that the amide shown adjacent the anti-TfR1 antibody in Formula (G) results from a reaction with an amine of the anti-TfR1 antibody, such as a lysine epsilon amine.

[0347] In some embodiments, in any one of the complexes described herein, the anti-TfR1 antibody is covalently linked via a lysine of the anti-TfR1 antibody to a molecular payload (e.g., an oligonucleotide) via a linker comprising a structure of:

[chemical structure]

[0348] wherein n is any number from 0-10, wherein m is any number from 0-10. In some embodiments, n is 3 and/or (e.g., and) m is 4.

[0349] In some embodiments, in any one of the complexes described herein, the anti-TfR1 antibody is covalently linked via a lysine of the anti-TfR1 antibody to a molecular payload (e.g., an oligonucleotide) via a linker comprising a structure of:

[chemical structure]

[0350] wherein n is any number from 0-10, wherein m is any number from 0-10. In some embodiments, n is 3 and/or (e.g., and) m is 4.

[0351] In some embodiments, in formulae (B), (D), (E), and (I), L1 is a spacer that is a substituted or unsubstituted aliphatic, substituted or unsubstituted heteroaliphatic, substituted or unsubstituted carbocyclylene, substituted or unsubstituted heterocyclylene, substituted or unsubstituted arylene, substituted or unsubstituted heteroarylene, —O—, —N(R^{A})—, —S—, —C(═O)—, —C(═O)O—, —C(═O)NR^{A}—, —NR^{A}C(═O)—, —NR^{A}C(═O)R^{A}—, —C(═O)R^{A}—, —NR^{A}C(═O)O—, —NR^{A}C(═O)N(R^{A})—, —OC(═O)—, —OC(═O)O—, —OC(═O)N(R^{A})—, —S(O)₂NR^{A}—, —NR^{A}S(O)₂—, or a combination thereof, wherein each R^{A} is independently hydrogen or substituted or unsubstituted alkyl. In some embodiments, L1 is

[chemical structure]

wherein L2 is

[chemical structure]

wherein a labels the site directly linked to the carbamate moiety of formulae (B), (D), (E), and (I); and b labels the site covalently linked (directly or via additional chemical moieties) to the oligonucleotide.

[0352] In some embodiments, L1 is:

[chemical structure]

[0353] wherein a labels the site directly linked to the carbamate moiety of formulae (B), (D), (E), and (I); and b labels the site covalently linked (directly or via additional chemical moieties) to the oligonucleotide.

[0354] In some embodiments, L1 is

[chemical structure]

[0355] In some embodiments, L1 is linked to a 5′ phosphate of the oligonucleotide. In some embodiments, the phosphate is a phosphodiester. In some embodiments, L1 is linked to a 5′ phosphorothioate of the oligonucleotide. In some embodiments, L1 is linked to a 5′ phosphonoamidate of the oligonucleotide. In some embodiments, L1 is linked via a phosphorodiamidate linkage to the 5′ end of the oligonucleotide.

[0356] In some embodiments, L1 is optional (e.g., need not be present).

[0357] In some embodiments, any one of the complexes described herein has a structure of:

[chemical structure]

[0358] wherein n is 0-15 (e.g., 3) and m is 0-15 (e.g., 4). It should be understood that the amide shown adjacent the anti-TfR1 antibody in Formula (J) results from a reaction with an amine of the anti-TfR1 antibody, such as a lysine epsilon amine.

[0359] In some embodiments, any one of the complexes described herein has a structure of:

[chemical structure]

[0360] wherein n is 0-15 (e.g., 3) and m is 0-15 (e.g., 4).

[0361] In some embodiments, the oligonucleotide is modified to comprise an amine group at the 5′ end, the 3′ end, or internally (e.g., as an amine functionalized nucleobase), prior to linking to a compound, e.g., a compound of formula (A) or formula (G).

[0362] Although linker conjugation is described in the context of anti-TfR1 antibodies and oligonucleotide molecular payloads, it should be understood that use of such linker conjugation on other muscle-targeting agents, such as other muscle-targeting antibodies, and/or on other molecular payloads is contemplated.

### D. Examples of Antibody-Molecular Payload Complexes

[0363] Further provided herein are non-limiting examples of complexes comprising any one the anti-TfR1 antibodies described herein covalently linked to any of the molecular payloads (e.g., an oligonucleotide) described herein. In some embodiments, the anti-TfR1 antibody (e.g., any one of the anti-TfR1 antibodies provided in Tables 2-7) is covalently linked to a molecular payload (e.g., an oligonucleotide such as the oligonucleotides provided in Table 8) via a linker. Any of the linkers described herein may be used. In some embodiments, if the molecular payload is an oligonucleotide, the linker is linked to the 5′ end of the oligonucleotide, the 3′ end of the oligonucleotide, or to an internal site of the oligonucleotide. In some embodiments, the linker is linked to the anti-TfR1 antibody via a thiol-reactive linkage (e.g., via a cysteine in the anti-TfR1 antibody). In some embodiments, the linker (e.g., a linker comprising a valine-citrulline sequence) is linked to the antibody (e.g., an anti-TfR1 antibody described herein) via an amine group (e.g., via a lysine in the antibody). In some embodiments, the molecular payload is a DMD-targeting oligonucleotide (e.g., a DMD-targeting oligonucleotide listed in Table 8, provided by any one of SEQ ID NO: 400-879, or complementary to any one of SEQ ID NO: 160-399).

[0364] An example of a structure of a complex comprising an anti-TfR1 antibody covalently linked to a molecular payload via a linker is provided below:

[chemical structure]

[0365] wherein the linker is linked to the antibody via a thiol-reactive linkage (e.g., via a cysteine in the antibody). In some embodiments, the molecular payload is a DMD-targeting oligonucleotide (e.g., a DMD-targeting oligonucleotide listed in Table 8, provided by any one of SEQ ID NO: 400-879, or complementary to any one of SEQ ID NO: 160-399).

[0366] Another example of a structure of a complex comprising an anti-TfR1 antibody covalently linked to a molecular payload via a linker is provided below:

[chemical structure]

[0367] wherein n is a number between 0-10, wherein m is a number between 0-10, wherein the linker is linked to the antibody via an amine group (e.g., on a lysine residue), and/or (e.g., and) wherein the linker is linked to the oligonucleotide (e.g., at the 5′ end, 3′ end, or internally). In some embodiments, the linker is linked to the antibody via a lysine, the linker is linked to the oligonucleotide at the 5′ end, n is 3, and m is 4. In some embodiments, the molecular payload is a DMD-targeting oligonucleotide (e.g., a DMD-targeting oligonucleotide listed in Table 8, provided by any one of SEQ ID NO: 400-879, or complementary to any one of SEQ ID NO: 160-399). It should be understood that the amide shown adjacent the anti-TfR1 antibody in Formula (E) results from a reaction with an amine of the anti-TfR1 antibody, such as a lysine epsilon amine.

[0368] It should be appreciated that antibodies can be linked to molecular payloads with different stoichiometries, a property that may be referred to as a drug to antibody ratios (DAR) with the “drug” being the molecular payload. In some embodiments, one molecular payload is linked to an antibody (DAR=1). In some embodiments, two molecular payloads are linked to an antibody (DAR=2). In some embodiments, three molecular payloads are linked to an antibody (DAR=3). In some embodiments, four molecular payloads are linked to an antibody (DAR=4). In some embodiments, a mixture of different complexes, each having a different DAR, is provided. In some embodiments, an average DAR of complexes in such a mixture may be in a range of 1 to 3, 1 to 4, 1 to 5 or more. An average DAR of complexes in a mixture need not be an integer value. DAR may be increased by conjugating molecular payloads to different sites on an antibody and/or (e.g., and) by conjugating multimers to one or more sites on antibody. For example, a DAR of 2 may be achieved by conjugating a single molecular payload to two different sites on an antibody or by conjugating a dimer molecular payload to a single site of an antibody.

[0369] In some embodiments, the complex described herein comprises an anti-TfR1 antibody described herein (e.g., the antibodies provided in Tables 2-7) covalently linked to a molecular payload. In some embodiments, the complex described herein comprises an anti-TfR1 antibody described herein (e.g., the antibodies provided in Tables 2-7) covalently linked to molecular payload via a linker (e.g., a linker comprising a valine-citrulline sequence). In some embodiments, the linker (e.g., a linker comprising a valine-citrulline sequence) is linked to the antibody (e.g., an anti-TfR1 antibody described herein) via a thiol-reactive linkage (e.g., via a cysteine in the antibody). In some embodiments, the linker (e.g., a linker comprising a valine-citrulline sequence) is linked to the antibody (e.g., an anti-TfR1 antibody described herein) via an amine group (e.g., via a lysine in the antibody). In some embodiments, the molecular payload is a DMD-targeting oligonucleotide (e.g., a DMD-targeting oligonucleotide listed in Table 8, provided by any one of SEQ ID NO: 400-879, or complementary to any one of SEQ ID NO: 160-399).

[0370] In some embodiments, the complex described herein comprises an anti-TfR1 antibody covalently linked to a molecular payload, wherein the anti-TfR1 antibody comprises a CDR-H1, a CDR-H2, a CDR-H3, a CDR-L1, a CDR-L2, and a CDR-L3 of any one of the antibodies listed in Table 2. In some embodiments, the molecular payload is a DMD-targeting oligonucleotide (e.g., a DMD-targeting oligonucleotide listed in Table 8, provided by any one of SEQ ID NO: 400-879, or complementary to any one of SEQ ID NO: 160-399).

[0371] In some embodiments, the complex described herein comprises an anti-TfR1 antibody covalently linked to a molecular payload, wherein the anti-TfR1 antibody comprises a VH comprising the amino acid sequence of SEQ ID NO: 69, SEQ ID NO: 71, or SEQ ID NO: 72, and a VL comprising the amino acid sequence of SEQ ID NO: 70. In some embodiments, the molecular payload is a DMD-targeting oligonucleotide (e.g., a DMD-targeting oligonucleotide listed in Table 8, provided by any one of SEQ ID NO: 400-879, or complementary to any one of SEQ ID NO: 160-399).

[0372] In some embodiments, the complex described herein comprises an anti-TfR1 antibody covalently linked to a molecular payload, wherein the anti-TfR1 antibody comprises a VH comprising the amino acid sequence of SEQ ID NO: 73 or SEQ ID NO: 76, and a VL comprising the amino acid sequence of SEQ ID NO: 74. In some embodiments, the molecular payload is a DMD-targeting oligonucleotide (e.g., a DMD-targeting oligonucleotide listed in Table 8, provided by any one of SEQ ID NO: 400-879, or complementary to any one of SEQ ID NO: 160-399).

[0373] In some embodiments, the complex described herein comprises an anti-TfR1 antibody covalently linked to a molecular payload, wherein the anti-TfR1 antibody comprises a VH comprising the amino acid sequence of SEQ ID NO: 73 or SEQ ID NO: 76, and a VL comprising the amino acid sequence of SEQ ID NO: 75. In some embodiments, the molecular payload is a DMD-targeting oligonucleotide (e.g., a DMD-targeting oligonucleotide listed in Table 8, provided by any one of SEQ ID NO: 400-879, or complementary to any one of SEQ ID NO: 160-399).

[0374] In some embodiments, the complex described herein comprises an anti-TfR1 antibody covalently linked to a molecular payload, wherein the anti-TfR1 antibody comprises a VH comprising the amino acid sequence of SEQ ID NO: 77, and a VL comprising the amino acid sequence of SEQ ID NO: 78. In some embodiments, the molecular payload is a DMD-targeting oligonucleotide (e.g., a DMD-targeting oligonucleotide listed in Table 8, provided by any one of SEQ ID NO: 400-879, or complementary to any one of SEQ ID NO: 160-399).

[0375] In some embodiments, the complex described herein comprises an anti-TfR1 antibody covalently linked to a molecular payload, wherein the anti-TfR1 antibody comprises a VH comprising the amino acid sequence of SEQ ID NO: 77 or SEQ ID NO: 79, and a VL comprising the amino acid sequence of SEQ ID NO: 80. In some embodiments, the molecular payload is a DMD-targeting oligonucleotide (e.g., a DMD-targeting oligonucleotide listed in Table 8, provided by any one of SEQ ID NO: 400-879, or complementary to any one of SEQ ID NO: 160-399).

[0376] In some embodiments, the complex described herein comprises an anti-TfR1 antibody covalently linked to a molecular payload, wherein the anti-TfR1 antibody comprises a VH comprising the amino acid sequence of SEQ ID NO: 154, and a VL comprising the amino acid sequence of SEQ ID NO: 155. In some embodiments, the molecular payload is a DMD-targeting oligonucleotide (e.g., a DMD-targeting oligonucleotide listed in Table 8, provided by any one of SEQ ID NO: 400-879, or complementary to any one of SEQ ID NO: 160-399).

[0377] In some embodiments, the complex described herein comprises an anti-TfR1 antibody covalently linked to a molecular payload, wherein the anti-TfR1 antibody comprises a heavy chain comprising the amino acid sequence of SEQ ID NO: 84, SEQ ID NO: 86 or SEQ ID NO: 87 and a light chain comprising the amino acid sequence of SEQ ID NO: 85. In some embodiments, the molecular payload is a DMD-targeting oligonucleotide (e.g., a DMD-targeting oligonucleotide listed in Table 8, provided by any one of SEQ ID NO: 400-879, or complementary to any one of SEQ ID NO: 160-399).

[0378] In some embodiments, the complex described herein comprises an anti-TfR1 antibody covalently linked to a molecular payload, wherein the anti-TfR1 antibody comprises a heavy chain comprising the amino acid sequence of SEQ ID NO: 88 or SEQ ID NO: 91, and a light chain comprising the amino acid sequence of SEQ ID NO: 89. In some embodiments, the molecular payload is a DMD-targeting oligonucleotide (e.g., a DMD-targeting oligonucleotide listed in Table 8, provided by any one of SEQ ID NO: 400-879, or complementary to any one of SEQ ID NO: 160-399).

[0379] In some embodiments, the complex described herein comprises an anti-TfR1 antibody covalently linked to a molecular payload, wherein the anti-TfR1 antibody comprises a heavy chain comprising the amino acid sequence of SEQ ID NO: 88 or SEQ ID NO: 91, and a light chain comprising the amino acid sequence of SEQ ID NO: 90. In some embodiments, the molecular payload is a DMD-targeting oligonucleotide (e.g., a DMD-targeting oligonucleotide listed in Table 8, provided by any one of SEQ ID NO: 400-879, or complementary to any one of SEQ ID NO: 160-399).

[0380] In some embodiments, the complex described herein comprises an anti-TfR1 antibody covalently linked to a molecular payload, wherein the anti-TfR1 antibody comprises a heavy chain comprising the amino acid sequence of SEQ ID NO: 92 or SEQ ID NO: 94, and a light chain comprising the amino acid sequence of SEQ ID NO: 95. In some embodiments, the molecular payload is a DMD-targeting oligonucleotide (e.g., a DMD-targeting oligonucleotide listed in Table 8, provided by any one of SEQ ID NO: 400-879, or complementary to any one of SEQ ID NO: 160-399).

[0381] In some embodiments, the complex described herein comprises an anti-TfR1 antibody covalently linked to a molecular payload, wherein the anti-TfR1 antibody comprises a heavy chain comprising the amino acid sequence of SEQ ID NO: 92, and a light chain comprising the amino acid sequence of SEQ ID NO: 93. In some embodiments, the molecular payload is a DMD-targeting oligonucleotide (e.g., a DMD-targeting oligonucleotide listed in Table 8, provided by any one of SEQ ID NO: 400-879, or complementary to any one of SEQ ID NO: 160-399).

[0382] In some embodiments, the complex described herein comprises an anti-TfR1 antibody covalently linked to a molecular payload, wherein the anti-TfR1 antibody comprises a heavy chain comprising the amino acid sequence of SEQ ID NO: 156, and a light chain comprising the amino acid sequence of SEQ ID NO: 157. In some embodiments, the molecular payload is a DMD-targeting oligonucleotide (e.g., a DMD-targeting oligonucleotide listed in Table 8, provided by any one of SEQ ID NO: 400-879, or complementary to any one of SEQ ID NO: 160-399).

[0383] In some embodiments, the complex described herein comprises an anti-TfR1 antibody covalently linked to a molecular payload, wherein the anti-TfR1 antibody comprises a heavy chain comprising the amino acid sequence of SEQ ID NO: 97, SEQ ID NO: 98, or SEQ ID NO: 99 and a light chain comprising the amino acid sequence of SEQ ID NO: 85. In some embodiments, the molecular payload is a DMD-targeting oligonucleotide (e.g., a DMD-targeting oligonucleotide listed in Table 8, provided by any one of SEQ ID NO: 400-879, or complementary to any one of SEQ ID NO: 160-399).

[0384] In some embodiments, the complex described herein comprises an anti-TfR1 antibody covalently linked to a molecular payload, wherein the anti-TfR1 antibody comprises a heavy chain comprising the amino acid sequence of SEQ ID NO: 100 or SEQ ID NO: 101 and a light chain comprising the amino acid sequence of SEQ ID NO: 89. In some embodiments, the molecular payload is a DMD-targeting oligonucleotide (e.g., a DMD-targeting oligonucleotide listed in Table 8, provided by any one of SEQ ID NO: 400-879, or complementary to any one of SEQ ID NO: 160-399).

[0385] In some embodiments, the complex described herein comprises an anti-TfR1 antibody covalently linked to a molecular payload, wherein the anti-TfR1 antibody comprises a heavy chain comprising the amino acid sequence of SEQ ID NO: 100 or SEQ ID NO: 101 and a light chain comprising the amino acid sequence of SEQ ID NO: 90. In some embodiments, the molecular payload is a DMD-targeting oligonucleotide (e.g., a DMD-targeting oligonucleotide listed in Table 8, provided by any one of SEQ ID NO: 400-879, or complementary to any one of SEQ ID NO: 160-399).

[0386] In some embodiments, the complex described herein comprises an anti-TfR1 antibody covalently linked to a molecular payload, wherein the anti-TfR1 antibody comprises a heavy chain comprising the amino acid sequence of SEQ ID NO: 102 and a light chain comprising the amino acid sequence of SEQ ID NO: 93. In some embodiments, the molecular payload is a DMD-targeting oligonucleotide (e.g., a DMD-targeting oligonucleotide listed in Table 8, provided by any one of SEQ ID NO: 400-879, or complementary to any one of SEQ ID NO: 160-399).

[0387] In some embodiments, the complex described herein comprises an anti-TfR1 antibody covalently linked to a molecular payload, wherein the anti-TfR1 antibody comprises a heavy chain comprising the amino acid sequence of SEQ ID NO: 102 or SEQ ID NO: 103 and a light chain comprising the amino acid sequence of SEQ ID NO: 95. In some embodiments, the molecular payload is a DMD-targeting oligonucleotide (e.g., a DMD-targeting oligonucleotide listed in Table 8, provided by any one of SEQ ID NO: 400-879, or complementary to any one of SEQ ID NO: 160-399).

[0388] In some embodiments, the complex described herein comprises an anti-TfR1 antibody covalently linked to a molecular payload, wherein the anti-TfR1 antibody comprises a heavy chain comprising the amino acid sequence of SEQ ID NO: 158 or SEQ ID NO: 159 and a light chain comprising the amino acid sequence of SEQ ID NO: 157. In some embodiments, the molecular payload is a DMD-targeting oligonucleotide (e.g., a DMD-targeting oligonucleotide listed in Table 8, provided by any one of SEQ ID NO: 400-879, or complementary to any one of SEQ ID NO: 160-399).

[0389] In any of the example complexes described herein, in some embodiments, the anti-TfR1 antibody is covalently linked to the molecular payload via a linker comprising a structure of:

[chemical structure]

[0390] wherein n is 3, m is 4.

[0391] In some embodiments, the complex described herein comprises an anti-TfR1 antibody covalently linked to the 5′ end of a DMD-targeting oligonucleotide (e.g., a DMD-targeting oligonucleotide listed in Table 8, provided by any one of SEQ ID NO: 400-879, or complementary to any one of SEQ ID NO: 160-399) via a lysine in the anti-TfR1 antibody, wherein the anti-TfR1 antibody comprises a CDR-H1, a CDR-H2, a CDR-H3, a CDR-L1, a CDR-L2, and a CDR-L3 of any one of the antibodies listed in Table 2, wherein the complex has a structure of:

[chemical structure]

[0392] wherein n is 3 and m is 4. It should be understood that the amide shown adjacent the anti-TfR1 antibody in Formula (E) results from a reaction with an amine of the anti-TfR1 antibody, such as a lysine epsilon amine.

[0393] In some embodiments, the complex described herein comprises an anti-TfR1 antibody covalently linked to the 5′ end of a DMD-targeting oligonucleotide (e.g., a DMD-targeting oligonucleotide listed in Table 8, provided by any one of SEQ ID NO: 400-879, or complementary to any one of SEQ ID NO: 160-399) via a lysine in the anti-TfR1 antibody, wherein the anti-TfR1 antibody comprises a VH and VL of any one of the antibodies listed in Table 3, wherein the complex has a structure of:

[chemical structure]

[0394] wherein n is 3 and m is 4. It should be understood that the amide shown adjacent the anti-TfR1 antibody in Formula (E) results from a reaction with an amine of the anti-TfR1 antibody, such as a lysine epsilon amine.

[0395] In some embodiments, the complex described herein comprises an anti-TfR1 antibody covalently linked to the 5′ end of a DMD-targeting oligonucleotide (e.g., a DMD-targeting oligonucleotide listed in Table 8, provided by any one of SEQ ID NO: 400-879, or complementary to any one of SEQ ID NO: 160-399) via a lysine in the anti-TfR1 antibody, wherein the anti-TfR1 antibody comprises a heavy chain and light chain of any one of the antibodies listed in Table 4, wherein the complex has a structure of:

[chemical structure]

[0396] wherein n is 3 and m is 4. It should be understood that the amide shown adjacent the anti-TfR1 antibody in Formula (E) results from a reaction with an amine of the anti-TfR1 antibody, such as a lysine epsilon amine.

[0397] In some embodiments, the complex described herein comprises an anti-TfR1 Fab covalently linked to the 5′ end of a DMD-targeting oligonucleotide (e.g., a DMD-targeting oligonucleotide listed in Table 8, provided by any one of SEQ ID NO: 400-879, or complementary to any one of SEQ ID NO: 160-399) via a lysine in the anti-TfR1 antibody, wherein the anti-TfR1 Fab comprises a heavy chain and light chain of any one of the antibodies listed in Table 5, wherein the complex has a structure of:

[chemical structure]

[0398] wherein n is 3 and m is 4. It should be understood that the amide shown adjacent the anti-TfR1 antibody in Formula (E) results from a reaction with an amine of the anti-TfR1 antibody, such as a lysine epsilon amine.

[0399] In some embodiments, in any one of the examples of complexes described herein, L1 is:

[chemical structure]

wherein L2 is

[chemical structure]

wherein a labels the site directly linked to the carbamate moiety of formulae (B), (D), (E), and (I); and b labels the site covalently linked (directly or via additional chemical moieties) to the oligonucleotide. In some embodiments, L1 is:

[chemical structure]

[0400] wherein a labels the site directly linked to the carbamate moiety of formulae (B), (D), (E), and (I); and b labels the site covalently linked (directly or via additional chemical moieties) to the oligonucleotide.

[0401] In some embodiments. L1 is linked to a 5′ phosphate of the oligonucleotide. In some embodiments, the phosphate is a phosphodiester. In some embodiments, L1 is linked to a 5′ phosphorothioate of the oligonucleotide. In some embodiments. L1 is linked to a 5′ phosphonoamidate of the oligonucleotide. In some embodiments, L1 is linked via a phosphorodiamidate linkage to the 5′ end of the oligonucleotide.

[0402] In some embodiments, L1 is optional (e.g., need not be present).

### III. Formulations

[0403] Complexes provided herein may be formulated in any suitable manner. Generally, complexes provided herein are formulated in a manner suitable for pharmaceutical use. For example, complexes can be delivered to a subject using a formulation that minimizes degradation, facilitates delivery and/or (e.g., and) uptake, or provides another beneficial property to the complexes in the formulation. In some embodiments, provided herein are compositions comprising complexes and pharmaceutically acceptable carriers. Such compositions can be suitably formulated such that when administered to a subject, either into the immediate environment of a target cell or systemically, a sufficient amount of the complexes enter target muscle cells. In some embodiments, complexes are formulated in buffer solutions such as phosphate-buffered saline solutions, liposomes, micellar structures, and capsids.

[0404] It should be appreciated that, in some embodiments, compositions may include separately one or more components of complexes provided herein (e.g., muscle-targeting agents, linkers, molecular payloads, or precursor molecules of any one of them).

[0405] In some embodiments, complexes are formulated in water or in an aqueous solution (e.g., water with pH adjustments). In some embodiments, complexes are formulated in basic buffered aqueous solutions (e.g., PBS). In some embodiments, formulations as disclosed herein comprise an excipient. In some embodiments, an excipient confers to a composition improved stability, improved absorption, improved solubility and/or (e.g., and) therapeutic enhancement of the active ingredient. In some embodiments, an excipient is a buffering agent (e.g., sodium citrate, sodium phosphate, a tris base, or sodium hydroxide) or a vehicle (e.g., a buffered solution, petrolatum, dimethyl sulfoxide, or mineral oil).

[0406] In some embodiments, a complex or component thereof (e.g., oligonucleotide or antibody) is lyophilized for extending its shelf-life and then made into a solution before use (e.g., administration to a subject). Accordingly, an excipient in a composition comprising a complex, or component thereof, described herein may be a lyoprotectant (e.g., mannitol, lactose, polyethylene glycol, or polyvinyl pyrolidone), or a collapse temperature modifier (e.g., dextran, ficoll, or gelatin).

[0407] In some embodiments, a pharmaceutical composition is formulated to be compatible with its intended route of administration. Examples of routes of administration include parenteral, e.g., intravenous, intradermal, subcutaneous, administration. Typically, the route of administration is intravenous or subcutaneous.

[0408] Pharmaceutical compositions suitable for injectable use include sterile aqueous solutions (where water soluble) or dispersions and sterile powders for the extemporaneous preparation of sterile injectable solutions or dispersions. The carrier can be a solvent or dispersion medium containing, for example, water, ethanol, polyol (for example, glycerol, propylene glycol, and liquid polyethylene glycol, and the like), and suitable mixtures thereof. In some embodiments, formulations include isotonic agents, for example, sugars, polyalcohols such as mannitol, sorbitol, and sodium chloride in the composition. Sterile injectable solutions can be prepared by incorporating the complexes in a required amount in a selected solvent with one or a combination of ingredients enumerated above, as required, followed by filtered sterilization.

[0409] In some embodiments, a composition may contain at least about 0.1% of the complex, or component thereof, or more, although the percentage of the active ingredient(s) may be between about 1% and about 80% or more of the weight or volume of the total composition. Factors such as solubility, bioavailability, biological half-life, route of administration, product shelf life, as well as other pharmacological considerations will be contemplated by one skilled in the art of preparing such pharmaceutical formulations, and as such, a variety of dosages and treatment regimens may be desirable.

### IV. Methods of Use/Treatment

[0410] Complexes comprising a muscle-targeting agent covalently linked to a molecular payload as described herein are effective in treating a subject having a dystrophinopathy, e.g., Duchenne muscular dystrophy. In some embodiments, complexes comprise a molecular payload that is an oligonucleotide, e.g., an antisense oligonucleotide that facilitates exon skipping of a pre-mRNA expressed from a mutated DMD allele.

[0411] In some embodiments, a subject may be a human subject, a non-human primate subject, a rodent subject, or any suitable mammalian subject. In some embodiments, a subject may have Duchenne muscular dystrophy or other dystrophinopathy. In some embodiments, a subject has a mutated DMD allele, which may optionally comprise at least one mutation in a DMD exon that causes a frameshift mutation and leads to improper RNA splicing/processing. In some embodiments, a subject is suffering from symptoms of a severe dystrophinopathy, e.g. muscle atrophy or muscle loss. In some embodiments, a subject has an asymptomatic increase in serum concentration of creatine phosphokinase (CK) and/or (e.g., and) muscle cramps with myoglobinuria. In some embodiments, a subject has a progressive muscle disease, such as Duchenne or Becker muscular dystrophy or DMD-associated dilated cardiomyopathy (DCM). In some embodiments, a subject is not suffering from symptoms of a dystrophinopathy.

[0412] In some embodiments, a subject has a mutation in a DMD gene that is amenable to exon 45 skipping. In some embodiments, a complex comprising a muscle-targeting agent covalently linked to a molecular payload as described herein is effective in treating a subject having a mutation in a DMD gene that is amenable to exon 45 skipping. In some embodiments, a complex comprises a molecular payload that is an oligonucleotide, e.g., an antisense oligonucleotide that facilitates skipping of exon 45 of a pre-mRNA, such as in a pre-mRNA encoded from a mutated DMD gene (e.g., a mutated DMD gene that is amenable to exon 45 skipping).

[0413] An aspect of the disclosure includes methods involving administering to a subject an effective amount of a complex as described herein. In some embodiments, an effective amount of a pharmaceutical composition that comprises a complex comprising a muscle-targeting agent covalently linked to a molecular payload can be administered to a subject in need of treatment. In some embodiments, a pharmaceutical composition comprising a complex as described herein may be administered by a suitable route, which may include intravenous administration, e.g., as a bolus or by continuous infusion over a period of time. In some embodiments, administration may be performed by intramuscular, intraperitoneal, intracerebrospinal, subcutaneous, intra-articular, intrasynovial, or intrathecal routes. In some embodiments, a pharmaceutical composition may be in solid form, aqueous form, or a liquid form. In some embodiments, an aqueous or liquid form may be nebulized or lyophilized. In some embodiments, a nebulized or lyophilized form may be reconstituted with an aqueous or liquid solution.

[0414] Compositions for intravenous administration may contain various carriers such as vegetable oils, dimethylactamide, dimethyformamide, ethyl lactate, ethyl carbonate, isopropyl myristate, ethanol, and polyols (glycerol, propylene glycol, liquid polyethylene glycol, and the like). For intravenous injection, water soluble antibodies can be administered by the drip method, whereby a pharmaceutical formulation containing the antibody and a physiologically acceptable excipients is infused. Physiologically acceptable excipients may include, for example, 5% dextrose, 0.9% saline, Ringer's solution or other suitable excipients. Intramuscular preparations, e.g., a sterile formulation of a suitable soluble salt form of the antibody, can be dissolved and administered in a pharmaceutical excipient such as Water-for-Injection, 0.9% saline, or 5% glucose solution.

[0415] In some embodiments, a pharmaceutical composition that comprises a complex comprising a muscle-targeting agent covalently linked to a molecular payload is administered via site-specific or local delivery techniques. Examples of these techniques include implantable depot sources of the complex, local delivery catheters, site specific carriers, direct injection, or direct application.

[0416] In some embodiments, a pharmaceutical composition that comprises a complex comprising a muscle-targeting agent covalently linked to a molecular payload is administered at an effective concentration that confers therapeutic effect on a subject. Effective amounts vary, as recognized by those skilled in the art, depending on the severity of the disease, unique characteristics of the subject being treated, e.g., age, physical conditions, health, or weight, the duration of the treatment, the nature of any concurrent therapies, the route of administration and related factors. These related factors are known to those in the art and may be addressed with no more than routine experimentation. In some embodiments, an effective concentration is the maximum dose that is considered to be safe for the patient. In some embodiments, an effective concentration will be the lowest possible concentration that provides maximum efficacy.

[0417] Empirical considerations, e.g., the half-life of the complex in a subject, generally will contribute to determination of the concentration of pharmaceutical composition that is used for treatment. The frequency of administration may be empirically determined and adjusted to maximize the efficacy of the treatment.

[0418] The efficacy of treatment may be assessed using any suitable methods. In some embodiments, the efficacy of treatment may be assessed by evaluation of observation of symptoms associated with a dystrophinopathy, e.g., muscle atrophy or muscle weakness, through measures of a subject's self-reported outcomes, e.g., mobility, self-care, usual activities, pain/discomfort, and anxiety/depression, or by quality-of-life indicators, e.g., lifespan.

[0419] In some embodiments, a pharmaceutical composition that comprises a complex comprising a muscle-targeting agent covalently linked to a molecular payload described herein is administered to a subject at an effective concentration sufficient to modulate activity or expression of a target gene by at least 10%, at least 20%, at least 30%, at least 40%, at least 50%, at least 60%, at least 70%, at least 80%, at least 90% or at least 95% relative to a control, e.g. baseline level of gene expression prior to treatment.

### Additional Embodiments

[0420] 1. A complex comprising an anti-transferrin receptor 1 (TfR1) antibody covalently linked to a molecular payload configured for inducing skipping of exon 45 in a DMD pre-mRNA, wherein the anti-TfR1 antibody is an antibody identified in any one of Tables 2-7.

[0421] 2. The complex of embodiment 1, wherein the anti-TfR1 antibody comprises:
[0422] (i) a heavy chain complementarity determining region 1 (CDR-H1) of SEQ ID NO: 33, a heavy chain complementarity determining region 2 (CDR-H2) of SEQ ID NO: 34, a heavy chain complementarity determining region 3 (CDR-H3) of SEQ ID NO: 35, a light chain complementarity determining region 1 (CDR-L1) of SEQ ID NO: 36, a light chain complementarity determining region 2 (CDR-L2) of SEQ ID NO: 37, and a light chain complementarity determining region 3 (CDR-L3) of SEQ ID NO: 32;
[0423] (ii) a CDR-H1 of SEQ ID NO: 7, a CDR-H2 of SEQ ID NO: 8, a CDR-H3 of SEQ ID NO: 9, a CDR-L1 of SEQ ID NO: 10, a CDR-L2 of SEQ ID NO: 11, and a CDR-L3 of SEQ ID NO: 6;
[0424] (iii) a CDR-H1 of SEQ ID NO: 7, a CDR-H2 of SEQ ID NO: 20, a CDR-H3 of SEQ ID NO: 9, a CDR-L1 of SEQ ID NO: 10, a CDR-L2 of SEQ ID NO: 11, and a CDR-L3 of SEQ ID NO: 6;
[0425] (iv) a CDR-H1 of SEQ ID NO: 7, a CDR-H2 of SEQ ID NO: 24, a CDR-H3 of SEQ ID NO: 9, a CDR-L1 of SEQ ID NO: 10, a CDR-L2 of SEQ ID NO: 11, and a CDR-L3 of SEQ ID NO: 6;
[0426] (v) a CDR-H1 of SEQ ID NO: 51, a CDR-H2 of SEQ ID NO: 52, a CDR-H3 of SEQ ID NO: 53, a CDR-L1 of SEQ ID NO: 54, a CDR-L2 of SEQ ID NO: 55, and a CDR-L3 of SEQ ID NO: 50;
[0427] (vi) a CDR-H1 of SEQ ID NO: 64, a CDR-H2 of SEQ ID NO: 52, a CDR-H3 of SEQ ID NO: 53, a CDR-L1 of SEQ ID NO: 54, a CDR-L2 of SEQ ID NO: 55, and a CDR-L3 of SEQ ID NO: 50; or
[0428] (vii) a CDR-H1 of SEQ ID NO: 67, a CDR-H2 of SEQ ID NO: 52, a CDR-H3 of SEQ ID NO: 53, a CDR-L1 of SEQ ID NO: 54, a CDR-L2 of SEQ ID NO: 55, and a CDR-L3 of SEQ ID NO: 50.

[0429] 3. The complex of embodiment 1 or embodiment 2, wherein the anti-TfR1 antibody comprises:
[0430] (i) a heavy chain variable region (VH) comprising an amino acid sequence at least 85% identical to SEQ ID NO: 76; and/or a light chain variable region (VL) comprising an amino acid sequence at least 85% identical to SEQ ID NO: 75;
[0431] (ii) a VH comprising an amino acid sequence at least 85% identical to SEQ ID NO: 69; and/or a VL comprising an amino acid sequence at least 85% identical to SEQ ID NO: 70;
[0432] (iii) a VH comprising an amino acid sequence at least 85% identical to SEQ ID NO: 71; and/or a VL comprising an amino acid sequence at least 85% identical to SEQ ID NO: 70;
[0433] (iv) a VH comprising an amino acid sequence at least 85% identical to SEQ ID NO: 72; and/or a VL comprising an amino acid sequence at least 85% identical to SEQ ID NO: 70;
[0434] (v) a VH comprising an amino acid sequence at least 85% identical to SEQ ID NO: 73; and/or a VL comprising an amino acid sequence at least 85% identical to SEQ ID NO: 74;
[0435] (vi) a VH comprising an amino acid sequence at least 85% identical to SEQ ID NO: 73; and/or a VL comprising an amino acid sequence at least 85% identical to SEQ ID NO: 75;
[0436] (vii) a VH comprising an amino acid sequence at least 85% identical to SEQ ID NO: 76; and/or a VL comprising an amino acid sequence at least 85% identical to SEQ ID NO: 74;
[0437] (viii) a VH comprising an amino acid sequence at least 85% identical to SEQ ID NO: 77; and/or a VL comprising an amino acid sequence at least 85% identical to SEQ ID NO: 78;
[0438] (ix) a VH comprising an amino acid sequence at least 85% identical to SEQ ID NO: 79; and/or a VL comprising an amino acid sequence at least 85% identical to SEQ ID NO: 80; or
[0439] (x) a VH comprising an amino acid sequence at least 85% identical to SEQ ID NO: 77; and/or a VL comprising an amino acid sequence at least 85% identical to SEQ ID NO: 80.

[0440] 4. The complex of any one of embodiments 1 to 3, wherein the anti-TfR1 antibody comprises:
[0441] (i) a VH comprising the amino acid sequence of SEQ ID NO: 76 and a VL comprising the amino acid sequence of SEQ ID NO: 75;
[0442] (ii) a VH comprising the amino acid sequence of SEQ ID NO: 69 and a VL comprising the amino acid sequence of SEQ ID NO: 70;
[0443] (iii) a VH comprising the amino acid sequence of SEQ ID NO: 71 and a VL comprising the amino acid sequence of SEQ ID NO: 70;
[0444] (iv) a VH comprising the amino acid sequence of SEQ ID NO: 72 and a VL comprising the amino acid sequence of SEQ ID NO: 70;
[0445] (v) a VH comprising the amino acid sequence of SEQ ID NO: 73 and a VL comprising the amino acid sequence of SEQ ID NO: 74;
[0446] (vi) a VH comprising the amino acid sequence of SEQ ID NO: 73 and a VL comprising the amino acid sequence of SEQ ID NO: 75;
[0447] (vii) a VH comprising the amino acid sequence of SEQ ID NO: 76 and a VL comprising the amino acid sequence of SEQ ID NO: 74;
[0448] (viii) a VH comprising the amino acid sequence of SEQ ID NO: 77 and a VL comprising the amino acid sequence of SEQ ID NO: 78;
[0449] (ix) a VH comprising the amino acid sequence of SEQ ID NO: 79 and a VL comprising the amino acid sequence of SEQ ID NO: 80; or
[0450] (x) a VH comprising the amino acid sequence of SEQ ID NO: 77 and a VL comprising the amino acid sequence of SEQ ID NO: 80.

[0451] 5. The complex of any one of embodiments 1 to 4, wherein the anti-TfR1 antibody is a Fab fragment, a Fab′ fragment, a F(ab′)2 fragment, an scFv, an Fv, or a full-length IgG.

[0452] 6. The complex of embodiment 5, wherein the anti-TfR1 antibody is a Fab fragment.

[0453] 7. The complex of embodiment 6, wherein the anti-TfR1 antibody comprises:
[0454] (i) a heavy chain comprising an amino acid sequence at least 85% identical to SEQ ID NO: 101; and/or a light chain comprising an amino acid sequence at least 85% identical to SEQ ID NO: 90;
[0455] (ii) a heavy chain comprising an amino acid sequence at least 85% identical to SEQ ID NO: 97; and/or a light chain comprising an amino acid sequence at least 85% identical to SEQ ID NO: 85;
[0456] (iii) a heavy chain comprising an amino acid sequence at least 85% identical to SEQ ID NO: 98; and/or a light chain comprising an amino acid sequence at least 85% identical to SEQ ID NO: 85;
[0457] (iv) a heavy chain comprising an amino acid sequence at least 85% identical to SEQ ID NO: 99; and/or a light chain comprising an amino acid sequence at least 85% identical to SEQ ID NO: 85;
[0458] (v) a heavy chain comprising an amino acid sequence at least 85% identical to SEQ ID NO: 100; and/or a light chain comprising an amino acid sequence at least 85% identical to SEQ ID NO: 89;
[0459] (vi) a heavy chain comprising an amino acid sequence at least 85% identical to SEQ ID NO: 100; and/or a light chain comprising an amino acid sequence at least 85% identical to SEQ ID NO: 90;
[0460] (vii) a heavy chain comprising an amino acid sequence at least 85% identical to SEQ ID NO: 101; and/or a light chain comprising an amino acid sequence at least 85% identical to SEQ ID NO: 89;
[0461] (viii) a heavy chain comprising an amino acid sequence at least 85% identical to SEQ ID NO: 102; and/or a light chain comprising an amino acid sequence at least 85% identical to SEQ ID NO: 93;
[0462] (ix) a heavy chain comprising an amino acid sequence at least 85% identical to SEQ ID NO: 103; and/or a light chain comprising an amino acid sequence at least 85% identical to SEQ ID NO: 95; or
[0463] (x) a heavy chain comprising an amino acid sequence at least 85% identical to SEQ ID NO: 102; and/or a light chain comprising an amino acid sequence at least 85% identical to SEQ ID NO: 95.

[0464] 8. The complex of embodiment 6 or embodiment 7, wherein the anti-TfR1 antibody comprises:
[0465] (i) a heavy chain comprising the amino acid sequence of SEQ ID NO: 101; and a light chain comprising the amino acid sequence of SEQ ID NO: 90;
[0466] (ii) a heavy chain comprising the amino acid sequence of SEQ ID NO: 97; and a light chain comprising the amino acid sequence of SEQ ID NO: 85;
[0467] (iii) a heavy chain comprising the amino acid sequence of SEQ ID NO: 98; and a light chain comprising the amino acid sequence of SEQ ID NO: 85;
[0468] (iv) a heavy chain comprising the amino acid sequence of SEQ ID NO: 99; and a light chain comprising the amino acid sequence of SEQ ID NO: 85;
[0469] (v) a heavy chain comprising the amino acid sequence of SEQ ID NO: 100; and a light chain comprising the amino acid sequence of SEQ ID NO: 89;
[0470] (vi) a heavy chain comprising the amino acid sequence of SEQ ID NO: 100; and a light chain comprising the amino acid sequence of SEQ ID NO: 90;
[0471] (vii) a heavy chain comprising the amino acid sequence of SEQ ID NO: 101; and a light chain comprising the amino acid sequence of SEQ ID NO: 89;
[0472] (viii) a heavy chain comprising the amino acid sequence of SEQ ID NO: 102; and a light chain comprising the amino acid sequence of SEQ ID NO: 93;
[0473] (ix) a heavy chain comprising the amino acid sequence of SEQ ID NO: 103; and a light chain comprising the amino acid sequence of SEQ ID NO: 95; or
[0474] (x) a heavy chain comprising the amino acid sequence of SEQ ID NO: 102; and a light chain comprising the amino acid sequence of SEQ ID NO: 95.

[0475] 9. The complex of any one of embodiments 1 to 8, wherein the anti-TfR1 antibody does not specifically bind to the transferrin binding site of the transferrin receptor 1 and/or wherein the anti-TfR1 antibody does not inhibit binding of transferrin to the transferrin receptor 1.

[0476] 10. The complex of any one of embodiments 1 to 9, wherein the molecular payload comprises an oligonucleotide.

[0477] 11. The complex of embodiment 10, wherein the oligonucleotide promotes antisense-mediated exon skipping in the DMD pre-RNA.

[0478] 12. The complex of embodiment 10 or 11, wherein the oligonucleotide comprises a region of complementarity to a splicing feature of the DMD pre-mRNA.

[0479] 13. The complex of embodiment 12, wherein the splicing feature is an exonic splicing enhancer (ESE) of the DMD pre-mRNA.

[0480] 14. The complex of embodiment 13, wherein the splicing feature is in exon 45 of the DMD pre-mRNA, optionally wherein the ESE comprises a sequence of any one of SEQ ID NOs: 885-912.

[0481] 15. The complex of embodiment 12, wherein the splicing feature is a branch point, a splice donor site, or a splice acceptor site.

[0482] 16. The complex of embodiment 15, wherein the splicing feature is across the junction of exon 44 and intron 44, in intron 44, across the junction of intron 44 and exon 45, across the junction of exon 45 and intron 45, in intron 45, or across the junction of intron 45 and exon 46 of the DMD pre-mRNA, optionally wherein the splicing feature comprises a sequence of any one of SEQ ID NOs: 880-884 and 913-916.

[0483] 17. The complex of any one of embodiments 12 to 16, wherein the region of complementarity comprises at least 4 consecutive nucleosides complementary to the splicing feature.

[0484] 18. The complex of any one of embodiments 1 to 9, wherein the molecular payload comprises an oligonucleotide comprising a sequence complementary to any one of SEQ ID NOs: 160-399 or comprising a sequence of any one of SEQ ID NOs: 400-879, wherein each thymine base (T) may independently and optionally be replaced with a uracil base (U), and each U may independently and optionally be replaced with a T.

[0485] 19. The complex of any one of embodiments 10 to 18, wherein the oligonucleotide comprises at least one modified internucleoside linkage.

[0486] 20. The complex of embodiment 19, wherein the at least one modified internucleoside linkage is a phosphorothioate linkage.

[0487] 21. The complex of any one of embodiments 10 to 20, wherein the oligonucleotide comprises one or more modified nucleosides.

[0488] 22. The complex of embodiment 21, wherein the one or more modified nucleosides are 2′-modified nucleosides.

[0489] 23. The complex of any one of embodiments 10 to 18, wherein the oligonucleotide comprises one or more phosphorodiamidate morpholinos, optionally wherein the oligonucleotide is a phosphorodiamidate morpholino oligomer (PMO).

[0490] 24. The complex of any one of embodiments 1 to 23, wherein the anti-TfR1 antibody is covalently linked to the molecular payload via a cleavable linker.

[0491] 25. The complex of embodiment 24, wherein the cleavable linker comprises a valine-citrulline sequence.

[0492] 26 The complex of any one of embodiments 1 to 25, wherein the anti-TfR1 antibody is covalently linked to the molecular payload via conjugation to a lysine residue or a cysteine residue of the antibody.

[0493] 27. A complex comprising an anti-TfR1 antibody covalently linked to an oligonucleotide configured for inducing skipping of exon 45 in a DMD pre-mRNA, wherein the oligonucleotide comprises a region of complementarity to any one of SEQ ID NOs: 160-399.

[0494] 28. The complex of embodiment 27, wherein the anti-TfR1 antibody is an antibody identified in any one of Tables 2-7.

[0495] 29. A complex comprising an anti-TfR1 antibody covalently linked to an oligonucleotide configured for inducing skipping of exon 45 in a DMD pre-mRNA, wherein the oligonucleotide comprises a region of complementarity to a splicing feature of the DMD pre-mRNA.

[0496] 30. An oligonucleotide that targets DMD, wherein the oligonucleotide comprises a region of complementarity to any one of SEQ ID NOs: 160-399.

[0497] 31. The oligonucleotide of embodiment 30, wherein the region of complementarity comprises at least 15 consecutive nucleosides complementary to any one of SEQ ID NOs: 160-399.

[0498] 32. The oligonucleotide of embodiment 30 or 31, wherein the oligonucleotide comprises at least 15 consecutive nucleosides of any one of SEQ ID NOs: 400-879, optionally wherein the oligonucleotide comprises a sequence of any one of SEQ ID NOs: 400-879, wherein each thymine base (T) may independently and optionally be replaced with a uracil base (U), and each U may independently and optionally be replaced with a T.

[0499] 33. A method of delivering a molecular payload to a cell, the method comprising contacting the cell with the complex of any one of embodiments 1 to 26.

[0500] 34. A method of delivering an oligonucleotide to a cell, the method comprising contacting the cell with the complex of any one of embodiments 27 to 29.

[0501] 35. A method of promoting the expression or activity of a dystrophin protein in a cell, the method comprising contacting the cell with the complex of any one of embodiments 1 to 26 in an amount effective for promoting internalization of the molecular payload to the cell, optionally wherein the cell is a muscle cell.

[0502] 36. A method of promoting the expression or activity of a dystrophin protein in a cell, the method comprising contacting the cell with the complex of any one of embodiments 27 to 29 in an amount effective for promoting internalization of the oligonucleotide to the cell, optionally wherein the cell is a muscle cell.

[0503] 37. The method of embodiment 35 or 36, wherein the cell is in vitro.

[0504] 38 The method of embodiment 35 or 36, wherein the cell is in a subject.

[0505] 39. The method of embodiment 38, wherein the subject is a human.

[0506] 40. The method of embodiment 39, wherein the subject has a DMD gene that is amenable to skipping of exon 45.

[0507] 41. The method of any one of embodiments 35 to 40, wherein the dystrophin protein is a truncated dystrophin protein.

[0508] 42. A method of treating a subject having a mutated DMD allele that is associated with a dystrophinopathy, the method comprising administering to the subject an effective amount of the complex of any one of embodiments 1 to 29.

[0509] 43. A method of promoting skipping of exon 45 of a DMD pre-mRNA transcript in a cell, the method comprising contacting the cell with an effective amount of the complex of any one of embodiments 1 to 29.

[0510] 44. A method of treating a subject having a mutated DMD allele that is associated with a dystrophinopathy, the method comprising administering to the subject an effective amount of the complex of any one of embodiments 1 to 29.

### EXAMPLES

### Example 1. Exon-Skipping Activity of Anti-TfR1 Antibody Conjugates in Duchenne Muscular Dystrophy Patient Myotubes

[0511] In this study, the exon-skipping activities of anti-TfR1 antibody conjugates comprising an anti-TfR1 Fab (3M12 VH4/VK3) covalently linked to a DMD exon 51-skipping antisense oligonucleotide (ASO) were evaluated. The DMD exon 51-skipping ASO is a phosphorodiamidate morpholino oligomer (PMO) of 30 nucleotides in length and targets an ESE in DMD exon 51 having the sequence TGGAGGT (SEQ ID NO: 974). Immortalized human myoblasts bearing an exon 52 deletion in the DMD gene were thawed and seeded at a density of 1e6 cell/flask in Promocell Skeletal Cell Growth Media (with 5% FBS and 1× Pen-Strep) and allowed to grow to confluency. Once confluent, cells were trypsinized and pelleted via centrifugation and resuspended in fresh Promocell Skeletal Cell Growth Media. The cell number was counted and cells were seeded into Matrigel-coated 96-well plates at a density of 50,000 cells/well. Cells were allowed to recover for 24 hours. Cells were induced to differentiate into myotubes by aspirating the growth media and replacing with differentiation media with no serum. Cells were then treated with the DMD exon 51-skipping oligonucleotide (not covalently linked to an antibody—“naked”) at 10 UM ASO or the anti-TfR1 Fab (3M12 VH4/VK3) covalently linked to the DMD exon 51-skipping oligonucleotide at 10 UM ASO equivalent. Cells were incubated with test articles for ten days then total RNA was harvested from the 96 well plates. cDNA synthesis was performed on 75 ng of total RNA, and mutation specific PCRs were performed to evaluate the degree of exon 51 skipping in the cells. Mutation-specific PCR products were run on a 4% agarose gel and visualized using SYBR gold. Densitometry was used to calculate the relative amounts of the skipped and unskipped amplicon and exon skipping was determined as a ratio of the Exon 51 skipped amplicon divided by the total amount of amplicon present:

$$\% Exon Skipping = \frac{Skipped Amplicon}{( Skipped Amplicon + Unskipped Amplicon )} * 100 .$$

[0512] The results demonstrate that the conjugate resulted in enhanced exon skipping compared to the naked DMD exon 51-skipping oligonucleotide in patient myotubes (FIG. 1). This indicates that anti-TfR1 Fab 3M12 VH4/VK3 enabled cellular internalization of the conjugate into muscle cells resulting in activity of the exon 51-skipping oligonucleotide in the muscle cells. Similarly, an anti-TfR1 antibody (e.g., anti-TfR1 Fab 3M12 VH4/VK3) can enable internalization of a conjugate comprising the anti-TfR1 antibody covalently linked to other exon skipping oligonucleotides (e.g., an exon skipping oligonucleotide provided herein, such as an exon 45 skipping oligonucleotide) into muscle cells and facilitate activity of the exon skipping oligonucleotide in the muscle cells.

### Example 2. Exon Skipping Activity of Anti-TfR1 Fab-ASO Conjugate In Vivo in Cynomolgus Monkeys

[0513] Anti-TfR1 Fab 3M12 VH4/VK3 was covalently linked to the DMD exon 51-skipping antisense oligonucleotide (ASO) that was used in Example 1. The exon skipping activity of the conjugate was tested in vivo in healthy non-human primates. Naïve male cynomolgus monkeys (n=4-5 per group) were administered two doses of vehicle, 30 mg/kg naked ASO (i.e., not covalently linked to an antibody), or 122 mg/kg anti-TfR1 Fab (3M12 VH4/VK3) covalently linked to the DMD exon 51-skipping oligonucleotide (30 mg/kg ASO equivalent) via intravenous infusion on days 1 and 8. Animals were sacrificed and tissues harvested either 2 weeks or 4 weeks after the first dose was administered. Total RNA was collected from tissue samples using a Promega Maxwell® RSC instrument and cDNA synthesis was performed using qScript cDNA SuperMix. Assessment of exon 51 skipping was performed using end-point PCR.

[0514] Capillary electrophoresis of the PCR products was used to assess exon skipping, and % exon 51 skipping was calculated using the following formula:

$$\% Exon Skipping = \frac{Molarity of Skipped Band}{Molarity of Skipped Band + Molarity of Unskipped Band} * 100 .$$

[0515] Calculated exon 51 skipping results are shown in Table 10.

TABLE 10
Exon 51 skipping of DMD mRNA in cynomolgus monkey

| | Time | | | | |
|---|---|---|---|---|---|
| | 2 weeks | | | 4 weeks | |
| | Group | | | | |
| | | Naked | | Naked | |
| | Vehicle | ASO^{a} | Conjugate | ASO^{a} | Conjugate |
| Conjugate dose^{b} | 0 | n/a | 122 | n/a | 122 |
| ASO Dose^{c} | 0 | 30 | 30 | 30 | 30 |
| Quadriceps ^{d} | 0.00 | 1.216 | 4.906 | 0.840 | 1.708 |
| | (0.00) | (1.083) | (3.131) | (1.169) | (1.395) |
| Diaphragm ^{d} | 0.00 | 1.891 | 7.315 | 0.717 | 9.225 |
| | (0.00) | (2.911) | (1.532) | (1.315) | (4.696) |
| Heart ^{d} | 0.00 | 0.043 | 3.42 | 0.00 | 4.525 |
| | (0.00) | (0.096) | (1.192) | (0.00) | (1.400) |
| Biceps ^{d} | 0.00 | 0.607 | 3.129 | 1.214 | 4.863 |
| | (0.00) | (0.615) | (0.912) | (1.441) | (3.881) |
| Tibialis anterior ^{d} | 0.00 | 0.699 | 1.042 | 0.384 | 0.816 |
| | (0.00) | (0.997) | (0.685) | (0.615) | (0.915) |
| Gastrocnemius ^{d} | 0.00 | 0.388 | 2.424 | 0.00 | 5.393 |
| | (0.00) | (0.573) | (2.329) | (0.00) | (2.695) |

^{a}ASO = antisense oligonucleotide.
^{b}Conjugate doses are listed as mg/kg of anti-TfR1 Fab 3M12 VH4/Vκ3-ASO conjugate.
^{c}ASO doses are listed as mg/kg ASO or ASO equivalent of the anti-TfR1 Fab 3M12 VH4/Vκ3-ASO dose.
^{d} Exon skipping values are mean % exon 51 skipping with standard deviations (n = 5) in parentheses.

[0516] Tissue ASO accumulation was also quantified using a hybridization ELISA with a probe complementary to the ASO sequence. A standard curve was generated and ASO levels (in ng/g) were derived from a linear regression of the standard curve. The ASO was distributed to all tissues evaluated at a higher level following the administration of the anti-TfR1 Fab VH4/VK3-ASO conjugate as compared to the administration of naked ASO. Intravenous administration of naked ASO resulted in levels of ASO that were close to background levels in all tissues evaluated at 2 and 4 weeks after the first does was administered. Administration of anti-TfR1 Fab VH4/VK3-ASO conjugate resulted in distribution of ASO through the tissues evaluated with a rank order of heart>diaphragm>bicep>quadriceps>gastrocnemius>tibialis anterior 2 weeks after first dosing. The duration of tissue concentration was also assessed. Concentrations of the ASO in quadriceps, bicep and diaphragm decreased by less than 50% over the time period evaluated (2 to 4 weeks), while levels of ASO in the heart, tibialis anterior, and gastrocnemius remained virtually unchanged (Table 11). This indicates that anti-TfR1 Fab 3M12 VH4/VK3 enabled cellular internalization of the conjugate into muscle cells in vivo, resulting in activity of the exon skipping oligonucleotide in the muscle cells. Similarly, an anti-TfR1 antibody (e.g., anti-TfR1 Fab 3M12 VH4/VK3) in vivo can enable internalization of a conjugate comprising the anti-TfR1 antibody covalently linked to other exon skipping oligonucleotides (e.g., an exon skipping oligonucleotide provided herein, such as an exon 45 skipping oligonucleotide) into muscle cells and facilitate activity of the exon skipping oligonucleotide in the muscle cells.

TABLE 11
Tissue distribution of DMD exon 51
skipping ASO in cynomolgus monkeys

| | Time | | | | |
|---|---|---|---|---|---|
| | 2 weeks | | | 4 weeks | |
| | Group | | | | |
| | | Naked | Con- | Naked | Con- |
| | Vehicle | ASO^{a} | jugate | ASO^{a} | jugate |
| Conjugate Dose^{b} | 0 | n/a | 122 | n/a | 122 |
| ASO Dose^{c} | 0 | 30 | 30 | 30 | 30 |
| Quadriceps ^{d} | 0 | 696.8 | 2436 | 197 | 682 |
| | (59.05) | (868.15) | (954.0) | (134) | (281) |
| Diaphragm ^{d} | 0± | 580.02 | 6750 | 60 | 3131 |
| | (144.3) | (360.11) | (2256) | (120) | (1618) |
| Heart ^{d} | 0 | 1449 | 27138 | 943 | 30410 |
| | (396.03) | (1337) | (6315) | (1803) | (9247) |
| Biceps ^{d} | 0 | 615.63 | 2840 | 130 | 1326 |
| | (69.58) | (335.17) | (980.31) | (80) | (623) |
| Tibialis anterior ^{d} | 0 | 564.71 | 1591 | 169 | 1087 |
| | (76.31) | (327.88) | (253.50) | (110) | (514) |
| Gastrocnemius ^{d} | 0 | 705.47 | 2096 | 170 | 1265 |
| | (41.15) | (863.75) | (474.04) | (69) | (272) |

^{a}ASO = Antisense oligonucleotide.
^{b}Conjugate doses are listed as mg/kg of anti-TfR1 Fab 3M12 VH4/Vκ3-ASO conjugate.
^{c}ASO doses are listed as mg/kg ASO or ASO equivalent of the anti-TfR1 Fab 3M12 VH4/Vκ3-ASO conjugate dose.
^{d} ASO values are mean concentrations of ASO in tissue as ng/g with standard deviations (n = 5) in parentheses.

### Example 3. Exon 45 Skipping Activity of Antisense Oligonucleotides

[0517] Immortalized human myoblasts were thawed and seeded at a density of 1e6 cell/flask in Promocell Skeletal Cell Growth Media (with 5% FBS and 1× Pen-Strep) and allowed to grow to confluency. Once confluent, cells were trypsinized and pelleted via centrifugation and resuspended in fresh Promocell Skeletal Cell Growth Media. The cell number was counted and cells were seeded into Matrigel-coated 96-well plates at a density of 50,000 cells/well. Cells were allowed to recover for 24 hours. Cells were induced to differentiate into myotubes by aspirating the growth media and replacing with differentiation media with no serum. Cells were then treated with DMD exon 45-skipping oligonucleotides (ASOs; not covalently linked to an antibody—“naked”) comprising the nucleobase sequences provided in Table 12 at 10 μM ASO. The exon 45-skipping ASOs are phosphorodiamidate morpholino oligomers (PMOs). Cells were incubated with test articles for ten days then total RNA was harvested from the 96 well plates. cDNA synthesis was performed on 75 ng of total RNA, and PCRs were performed to evaluate the degree of exon 45 skipping in the cells. PCR products were measured using capillary electrophoresis with UV detection. Molarity was calculated and relative amounts of the skipped and unskipped amplicon were determined. Exon skipping was determined as a ratio of the Exon 45 skipped amplicon divided by the total amount of amplicon present, according to the following formula:

$$\% Exon Skipping = \frac{Skipped Amplicon}{( Skipped Amplicon + Unskipped Amplicon )} * 100 .$$

TABLE 12
Exon 45 skipping activity of ASOs

| | SEQ ID | % Exon |
|---|---|---|
| ASO Sequence | NO: | 45 Skipping |
| TTATTTCTTCCCCAGTTGCATTCA | 720 | 100 |
| TTATTTCTTCCCCAGTTGCATTCAA | 716 | 100 |
| TACTGGCATCTGTTTTTGAGGA | 760 | 81.97831 |
| CTGCCCAATGCCATCCTGGAGTTCC | 691 | 99.59011 |
| CCCAATGCCATCCTGGAGTTCCTGT | 677 | 98.68205 |
| CCAATGCCATCCTGGAGTTC | 692 | 98.51852 |
| CCAATGCCATCCTGGAGTTCC | 688 | 98.14503 |
| GCTGCCCAATGCCATCCTGGAGTTC | 697 | 98.06374 |
| CCCAATGCCATCCTGGAGTTC | 693 | 96.36427 |
| AATGCCATCCTGGAGTTCCTGT | 675 | 95.96277 |

### EQUIVALENTS AND TERMINOLOGY

[0518] The disclosure illustratively described herein suitably can be practiced in the absence of any element or elements, limitation or limitations that are not specifically disclosed herein. Thus, for example, in each instance herein any of the terms “comprising”, “consisting essentially of”, and “consisting of” may be replaced with either of the other two terms. The terms and expressions which have been employed are used as terms of description and not of limitation, and there is no intention that in the use of such terms and expressions of excluding any equivalents of the features shown and described or portions thereof, but it is recognized that various modifications are possible within the scope of the disclosure. Thus, it should be understood that although the present disclosure has been specifically disclosed by preferred embodiments, optional features, modification and variation of the concepts herein disclosed may be resorted to by those skilled in the art, and that such modifications and variations are considered to be within the scope of this disclosure.

[0519] In addition, where features or aspects of the disclosure are described in terms of Markush groups or other grouping of alternatives, those skilled in the art will recognize that the disclosure is also thereby described in terms of any individual member or subgroup of members of the Markush group or other group.

[0520] It should be appreciated that, in some embodiments, sequences presented in the sequence listing may be referred to in describing the structure of an oligonucleotide or other nucleic acid. In such embodiments, the actual oligonucleotide or other nucleic acid may have one or more alternative nucleotides or nucleosides (e.g., an RNA counterpart of a DNA nucleoside or a DNA counterpart of an RNA nucleoside) and/or (e.g., and) one or more modified nucleotides/nucleosides and/or (e.g., and) one or more modified internucleoside linkages and/or (e.g., and) one or more other modification compared with the specified sequence while retaining essentially same or similar complementary properties as the specified sequence.

[0521] The use of the terms “a” and “an” and “the” and similar referents in the context of describing the invention (especially in the context of the following claims) are to be construed to cover both the singular and the plural, unless otherwise indicated herein or clearly contradicted by context. The terms “comprising.” “having.” “including,” and “containing” are to be construed as open-ended terms (i.e., meaning “including, but not limited to,”) unless otherwise noted. Recitation of ranges of values herein are merely intended to serve as a shorthand method of referring individually to each separate value falling within the range, unless otherwise indicated herein, and each separate value is incorporated into the specification as if it were individually recited herein. All methods described herein can be performed in any suitable order unless otherwise indicated herein or otherwise clearly contradicted by context. The use of any and all examples, or exemplary language (e.g., “such as”) provided herein, is intended merely to better illuminate the invention and does not pose a limitation on the scope of the invention unless otherwise claimed. No language in the specification should be construed as indicating any non-claimed element as essential to the practice of the invention.

[0522] Embodiments of this invention are described herein. Variations of those embodiments may become apparent to those of ordinary skill in the art upon reading the foregoing description.

[0523] The inventors expect skilled artisans to employ such variations as appropriate, and the inventors intend for the invention to be practiced otherwise than as specifically described herein. Accordingly, this invention includes all modifications and equivalents of the subject matter recited in the claims appended hereto as permitted by applicable law. Moreover, any combination of the above-described elements in all possible variations thereof is encompassed by the invention unless otherwise indicated herein or otherwise clearly contradicted by context.

[0524] Those skilled in the art will recognize, or be able to ascertain using no more than routine experimentation, many equivalents to the specific embodiments of the invention described herein. Such equivalents are intended to be encompassed by the following claims.

The application's sequence listing, which the Patent Office published only in electronic form, follows.

SEQUENCE LISTING (1006 sequences)

SEQ ID NO: 1 - protein, 8 aa, synthetic construct
  REGION 1..8: note = Synthetic
GFNIKDDY

SEQ ID NO: 2 - protein, 8 aa, synthetic construct
  REGION 1..8: note = Synthetic
IDPENGDT

SEQ ID NO: 3 - protein, 10 aa, synthetic construct
  REGION 1..10: note = Synthetic
TLWLRRGLDY

SEQ ID NO: 4 - protein, 11 aa, synthetic construct
  REGION 1..11: note = Synthetic
KSLLHSNGYTY

SEQ ID NO: 5 - skipped

SEQ ID NO: 6 - protein, 9 aa, synthetic construct
  REGION 1..9: note = Synthetic
MQHLEYPFT

SEQ ID NO: 7 - protein, 5 aa, synthetic construct
  REGION 1..5: note = Synthetic
DDYMY

SEQ ID NO: 8 - protein, 17 aa, synthetic construct
  REGION 1..17: note = Synthetic
WIDPENGDTEYASKFQD

SEQ ID NO: 9 - protein, 8 aa, synthetic construct
  REGION 1..8: note = Synthetic
WLRRGLDY

SEQ ID NO: 10 - protein, 16 aa, synthetic construct
  REGION 1..16: note = Synthetic
RSSKSLLHSNGYTYLF

SEQ ID NO: 11 - protein, 7 aa, synthetic construct
  REGION 1..7: note = Synthetic
RMSNLAS

SEQ ID NO: 12 - protein, 7 aa, synthetic construct
  REGION 1..7: note = Synthetic
GFNIKDD

SEQ ID NO: 13 - skipped

SEQ ID NO: 14 - protein, 6 aa, synthetic construct
  REGION 1..6: note = Synthetic
LRRGLD

SEQ ID NO: 15 - protein, 12 aa, synthetic construct
  REGION 1..12: note = Synthetic
SKSLLHSNGYTY

SEQ ID NO: 16 - protein, 6 aa, synthetic construct
  REGION 1..6: note = Synthetic
HLEYPF

SEQ ID NO: 17 - protein, 117 aa, synthetic construct
  REGION 1..117: note = Synthetic
EVQLQQSGAELVRPGASVKLSCTASGFNIKDDYMYWVKQRPEQGLEWIGWIDPENGDTEYASKFQDKATVTADTSSNTAYLQLSSLTSEDTAVYYCTLWLRRGLDYWGQGTSVTVSS

SEQ ID NO: 18 - protein, 112 aa, synthetic construct
  REGION 1..112: note = Synthetic
DIVMTQAAPSVPVTPGESVSISCRSSKSLLHSNGYTYLFWFLQRPGQSPQLLIYRMSNLASGVPDRFSGSGSGTAFTLRISRVEAEDVGVYYCMQHLEYPFTFGGGTKLEIK

SEQ ID NO: 19 - protein, 8 aa, synthetic construct
  REGION 1..8: note = Synthetic
IDPETGDT

SEQ ID NO: 20 - protein, 17 aa, synthetic construct
  REGION 1..17: note = Synthetic
WIDPETGDTEYASKFQD

SEQ ID NO: 21 - skipped

SEQ ID NO: 22 - protein, 117 aa, synthetic construct
  REGION 1..117: note = Synthetic
EVQLQQSGAELVRPGASVKLSCTASGFNIKDDYMYWVKQRPEQGLEWIGWIDPETGDTEYASKFQDKATVTADTSSNTAYLQLSSLTSEDTAVYYCTLWLRRGLDYWGQGTSVTVSS

SEQ ID NO: 23 - protein, 8 aa, synthetic construct
  REGION 1..8: note = Synthetic
IDPESGDT

SEQ ID NO: 24 - protein, 17 aa, synthetic construct
  REGION 1..17: note = Synthetic
WIDPESGDTEYASKFQD

SEQ ID NO: 25 - skipped

SEQ ID NO: 26 - protein, 117 aa, synthetic construct
  REGION 1..117: note = Synthetic
EVQLQQSGAELVRPGASVKLSCTASGFNIKDDYMYWVKQRPEQGLEWIGWIDPESGDTEYASKFQDKATVTADTSSNTAYLQLSSLTSEDTAVYYCTLWLRRGLDYWGQGTSVTVSS

SEQ ID NO: 27 - protein, 9 aa, synthetic construct
  REGION 1..9: note = Synthetic
GYSITSGYY

SEQ ID NO: 28 - protein, 7 aa, synthetic construct
  REGION 1..7: note = Synthetic
ITFDGAN

SEQ ID NO: 29 - protein, 12 aa, synthetic construct
  REGION 1..12: note = Synthetic
TRSSYDYDVLDY

SEQ ID NO: 30 - protein, 6 aa, synthetic construct
  REGION 1..6: note = Synthetic
QDISNF

SEQ ID NO: 31 - skipped

SEQ ID NO: 32 - protein, 9 aa, synthetic construct
  REGION 1..9: note = Synthetic
QQGHTLPYT

SEQ ID NO: 33 - protein, 6 aa, synthetic construct
  REGION 1..6: note = Synthetic
SGYYWN

SEQ ID NO: 34 - protein, 16 aa, synthetic construct
  REGION 1..16: note = Synthetic
YITFDGANNYNPSLKN

SEQ ID NO: 35 - protein, 10 aa, synthetic construct
  REGION 1..10: note = Synthetic
SSYDYDVLDY

SEQ ID NO: 36 - protein, 11 aa, synthetic construct
  REGION 1..11: note = Synthetic
RASQDISNFLN

SEQ ID NO: 37 - protein, 7 aa, synthetic construct
  REGION 1..7: note = Synthetic
YTSRLHS

SEQ ID NO: 38 - protein, 8 aa, synthetic construct
  REGION 1..8: note = Synthetic
GYSITSGY

SEQ ID NO: 39 - skipped

SEQ ID NO: 40 - protein, 8 aa, synthetic construct
  REGION 1..8: note = Synthetic
SYDYDVLD

SEQ ID NO: 41 - protein, 7 aa, synthetic construct
  REGION 1..7: note = Synthetic
SQDISNF

SEQ ID NO: 42 - protein, 6 aa, synthetic construct
  REGION 1..6: note = Synthetic
GHTLPY

SEQ ID NO: 43 - protein, 119 aa, synthetic construct
  REGION 1..119: note = Synthetic
DVQLQESGPGLVKPSQSLSLTCSVTGYSITSGYYWNWIRQFPGNKLEWMGYITFDGANNYNPSLKNRISITRDTSKNQFFLKLTSVTTEDTATYYCTRSSYDYDVLDYWGQGTTLTVSS

SEQ ID NO: 44 - protein, 107 aa, synthetic construct
  REGION 1..107: note = Synthetic
DIQMTQTTSSLSASLGDRVTISCRASQDISNFLNWYQQRPDGTVKLLIYYTSRLHSGVPSRFSGSGSGTDFSLTVSNLEQEDIATYFCQQGHTLPYTFGGGTKLEIK

SEQ ID NO: 45 - protein, 8 aa, synthetic construct
  REGION 1..8: note = Synthetic
GYSFTDYC

SEQ ID NO: 46 - protein, 8 aa, synthetic construct
  REGION 1..8: note = Synthetic
IYPGSGNT

SEQ ID NO: 47 - protein, 13 aa, synthetic construct
  REGION 1..13: note = Synthetic
AREDYYPYHGMDY

SEQ ID NO: 48 - protein, 10 aa, synthetic construct
  REGION 1..10: note = Synthetic
ESVDGYDNSF

SEQ ID NO: 49 - skipped

SEQ ID NO: 50 - protein, 9 aa, synthetic construct
  REGION 1..9: note = Synthetic
QQSSEDPWT

SEQ ID NO: 51 - protein, 5 aa, synthetic construct
  REGION 1..5: note = Synthetic
DYCIN

SEQ ID NO: 52 - protein, 17 aa, synthetic construct
  REGION 1..17: note = Synthetic
WIYPGSGNTRYSERFKG

SEQ ID NO: 53 - protein, 11 aa, synthetic construct
  REGION 1..11: note = Synthetic
EDYYPYHGMDY

SEQ ID NO: 54 - protein, 15 aa, synthetic construct
  REGION 1..15: note = Synthetic
RASESVDGYDNSFMH

SEQ ID NO: 55 - protein, 7 aa, synthetic construct
  REGION 1..7: note = Synthetic
RASNLES

SEQ ID NO: 56 - protein, 7 aa, synthetic construct
  REGION 1..7: note = Synthetic
GYSFTDY

SEQ ID NO: 57 - skipped

SEQ ID NO: 58 - protein, 9 aa, synthetic construct
  REGION 1..9: note = Synthetic
DYYPYHGMD

SEQ ID NO: 59 - protein, 11 aa, synthetic construct
  REGION 1..11: note = Synthetic
SESVDGYDNSF

SEQ ID NO: 60 - protein, 6 aa, synthetic construct
  REGION 1..6: note = Synthetic
SSEDPW

SEQ ID NO: 61 - protein, 120 aa, synthetic construct
  REGION 1..120: note = Synthetic
QIQLQQSGPELVRPGASVKISCKASGYSFTDYCINWVNQRPGQGLEWIGWIYPGSGNTRYSERFKGKATLTVDTSSNTAYMQLSSLTSEDSAVYFCAREDYYPYHGMDYWGQGTSVTVSS

SEQ ID NO: 62 - protein, 111 aa, synthetic construct
  REGION 1..111: note = Synthetic
DIVLTQSPTSLAVSLGQRATISCRASESVDGYDNSFMHWYQQKPGQPPKLLIFRASNLESGIPARFSGSGSRTDFTLTINPVEAADVATYYCQQSSEDPWTFGGGTKLEIK

SEQ ID NO: 63 - protein, 8 aa, synthetic construct
  REGION 1..8: note = Synthetic
GYSFTDYY

SEQ ID NO: 64 - protein, 5 aa, synthetic construct
  REGION 1..5: note = Synthetic
DYYIN

SEQ ID NO: 65 - protein, 120 aa, synthetic construct
  REGION 1..120: note = Synthetic
QIQLQQSGPELVRPGASVKISCKASGYSFTDYYINWVNQRPGQGLEWIGWIYPGSGNTRYSERFKGKATLTVDTSSNTAYMQLSSLTSEDSAVYFCAREDYYPYHGMDYWGQGTSVTVSS

SEQ ID NO: 66 - protein, 8 aa, synthetic construct
  REGION 1..8: note = Synthetic
GYSFTDYD

SEQ ID NO: 67 - protein, 5 aa, synthetic construct
  REGION 1..5: note = Synthetic
DYDIN

SEQ ID NO: 68 - protein, 120 aa, synthetic construct
  REGION 1..120: note = Synthetic
QIQLQQSGPELVRPGASVKISCKASGYSFTDYDINWVNQRPGQGLEWIGWIYPGSGNTRYSERFKGKATLTVDTSSNTAYMQLSSLTSEDSAVYFCAREDYYPYHGMDYWGQGTSVTVSS

SEQ ID NO: 69 - protein, 117 aa, synthetic construct
  REGION 1..117: note = Synthetic
EVQLVQSGSELKKPGASVKVSCTASGFNIKDDYMYWVRQPPGKGLEWIGWIDPETGDTEYASKFQDRVTVTADTSTNTAYMELSSLRSEDTAVYYCTLWLRRGLDYWGQGTLVTVSS

SEQ ID NO: 70 - protein, 112 aa, synthetic construct
  REGION 1..112: note = Synthetic
DIVMTQSPLSLPVTPGEPASISCRSSKSLLHSNGYTYLFWFQQRPGQSPRLLIYRMSNLASGVPDRFSGSGSGTDFTLKISRVEAEDVGVYYCMQHLEYPFTFGGGTKVEIK

SEQ ID NO: 71 - protein, 117 aa, synthetic construct
  REGION 1..117: note = Synthetic
EVQLVQSGSELKKPGASVKVSCTASGFNIKDDYMYWVRQPPGKGLEWIGWIDPESGDTEYASKFQDRVTVTADTSTNTAYMELSSLRSEDTAVYYCTLWLRRGLDYWGQGTLVTVSS

SEQ ID NO: 72 - protein, 117 aa, synthetic construct
  REGION 1..117: note = Synthetic
EVQLVQSGSELKKPGASVKVSCTASGFNIKDDYMYWVRQPPGKGLEWIGWIDPENGDTEYASKFQDRVTVTADTSTNTAYMELSSLRSEDTAVYYCTLWLRRGLDYWGQGTLVTVSS

SEQ ID NO: 73 - protein, 119 aa, synthetic construct
  REGION 1..119: note = Synthetic
QVQLQESGPGLVKPSQTLSLTCSVTGYSITSGYYWNWIRQPPGKGLEWMGYITFDGANNYNPSLKNRVSISRDTSKNQFSLKLSSVTAEDTATYYCTRSSYDYDVLDYWGQGTTVTVSS

SEQ ID NO: 74 - protein, 107 aa, synthetic construct
  REGION 1..107: note = Synthetic
DIQMTQSPSSLSASVGDRVTITCRASQDISNFLNWYQQKPGQPVKLLIYYTSRLHSGVPSRFSGSGSGTDFTLTISSLQPEDFATYFCQQGHTLPYTFGQGTKLEIK

SEQ ID NO: 75 - protein, 107 aa, synthetic construct
  REGION 1..107: note = Synthetic
DIQMTQSPSSLSASVGDRVTITCRASQDISNFLNWYQQKPGQPVKLLIYYTSRLHSGVPSRFSGSGSGTDFTLTISSLQPEDFATYYCQQGHTLPYTFGQGTKLEIK

SEQ ID NO: 76 - protein, 119 aa, synthetic construct
  REGION 1..119: note = Synthetic
QVQLQESGPGLVKPSQTLSLTCTVTGYSITSGYYWNWIRQPPGKGLEWIGYITFDGANNYNPSLKNRVSISRDTSKNQFSLKLSSVTAEDTATYYCTRSSYDYDVLDYWGQGTTVTVSS

SEQ ID NO: 77 - protein, 120 aa, synthetic construct
  REGION 1..120: note = Synthetic
QVQLVQSGAEVKKPGASVKVSCKASGYSFTDYYINWVRQAPGQGLEWMGWIYPGSGNTRYSERFKGRVTITRDTSASTAYMELSSLRSEDTAVYYCAREDYYPYHGMDYWGQGTLVTVSS

SEQ ID NO: 78 - protein, 111 aa, synthetic construct
  REGION 1..111: note = Synthetic
DIVLTQSPDSLAVSLGERATINCRASESVDGYDNSFMHWYQQKPGQPPKLLIFRASNLESGVPDRFSGSGSRTDFTLTISSLQAEDVAVYYCQQSSEDPWTFGQGTKLEIK

SEQ ID NO: 79 - protein, 120 aa, synthetic construct
  REGION 1..120: note = Synthetic
QVQLVQSGAEVKKPGASVKVSCKASGYSFTDYDINWVRQAPGQGLEWMGWIYPGSGNTRYSERFKGRVTITRDTSASTAYMELSSLRSEDTAVYYCAREDYYPYHGMDYWGQGTLVTVSS

SEQ ID NO: 80 - protein, 111 aa, synthetic construct
  REGION 1..111: note = Synthetic
DIVMTQSPDSLAVSLGERATINCRASESVDGYDNSFMHWYQQKPGQPPKLLIFRASNLESGVPDRFSGSGSGTDFTLTISSLQAEDVAVYYCQQSSEDPWTFGQGTKLEIK

SEQ ID NO: 81 - protein, 330 aa, Homo sapiens [sequence omitted]

SEQ ID NO: 82 - protein, 330 aa, synthetic construct
  REGION 1..330: note = Synthetic
ASTKGPSVFPLAPSSKSTSGGTAALGCLVKDYFPEPVTVSWNSGALTSGVHTFPAVLQSSGLYSLSSVVTVPSSSLGTQTYICNVNHKPSNTKVDKKVEPKSCDKTHTCPPCPAPEAAGGPSVFLFPPKPKDTLMISRTPEVTCVVVDVSHEDPEVKFNWYVDGVEVHNAKTKPREEQYNSTYRVVSVLTVLHQDWLNGKEYKCKVSNKALPAPIEKTISKAKGQPREPQVYTLPPSRDELTKNQVSLTCLVKGFYPSDIAVEWESNGQPENNYKTTPPVLDSDGSFFLYSKLTVDKSRWQQGNVFSCSVMHEALHNHYTQKSLSLSPGK

SEQ ID NO: 83 - protein, 107 aa, synthetic construct [sequence omitted]

SEQ ID NO: 84 - protein, 447 aa, synthetic construct
  REGION 1..447: note = Synthetic
EVQLVQSGSELKKPGASVKVSCTASGFNIKDDYMYWVRQPPGKGLEWIGWIDPETGDTEYASKFQDRVTVTADTSTNTAYMELSSLRSEDTAVYYCTLWLRRGLDYWGQGTLVTVSSASTKGPSVFPLAPSSKSTSGGTAALGCLVKDYFPEPVTVSWNSGALTSGVHTFPAVLQSSGLYSLSSVVTVPSSSLGTQTYICNVNHKPSNTKVDKKVEPKSCDKTHTCPPCPAPELLGGPSVFLFPPKPKDTLMISRTPEVTCVVVDVSHEDPEVKFNWYVDGVEVHNAKTKPREEQYNSTYRVVSVLTVLHQDWLNGKEYKCKVSNKALPAPIEKTISKAKGQPREPQVYTLPPSRDELTKNQVSLTCLVKGFYPSDIAVEWESNGQPENNYKTTPPVLDSDGSFFLYSKLTVDKSRWQQGNVFSCSVMHEALHNHYTQKSLSLSPGK

SEQ ID NO: 85 - protein, 219 aa, synthetic construct
  REGION 1..219: note = Synthetic
DIVMTQSPLSLPVTPGEPASISCRSSKSLLHSNGYTYLFWFQQRPGQSPRLLIYRMSNLASGVPDRFSGSGSGTDFTLKISRVEAEDVGVYYCMQHLEYPFTFGGGTKVEIKRTVAAPSVFIFPPSDEQLKSGTASVVCLLNNFYPREAKVQWKVDNALQSGNSQESVTEQDSKDSTYSLSSTLTLSKADYEKHKVYACEVTHQGLSSPVTKSFNRGEC

SEQ ID NO: 86 - protein, 447 aa, synthetic construct
  REGION 1..447: note = Synthetic
EVQLVQSGSELKKPGASVKVSCTASGFNIKDDYMYWVRQPPGKGLEWIGWIDPESGDTEYASKFQDRVTVTADTSTNTAYMELSSLRSEDTAVYYCTLWLRRGLDYWGQGTLVTVSSASTKGPSVFPLAPSSKSTSGGTAALGCLVKDYFPEPVTVSWNSGALTSGVHTFPAVLQSSGLYSLSSVVTVPSSSLGTQTYICNVNHKPSNTKVDKKVEPKSCDKTHTCPPCPAPELLGGPSVFLFPPKPKDTLMISRTPEVTCVVVDVSHEDPEVKFNWYVDGVEVHNAKTKPREEQYNSTYRVVSVLTVLHQDWLNGKEYKCKVSNKALPAPIEKTISKAKGQPREPQVYTLPPSRDELTKNQVSLTCLVKGFYPSDIAVEWESNGQPENNYKTTPPVLDSDGSFFLYSKLTVDKSRWQQGNVFSCSVMHEALHNHYTQKSLSLSPGK

SEQ ID NO: 87 - protein, 447 aa, synthetic construct
  REGION 1..447: note = Synthetic
EVQLVQSGSELKKPGASVKVSCTASGFNIKDDYMYWVRQPPGKGLEWIGWIDPENGDTEYASKFQDRVTVTADTSTNTAYMELSSLRSEDTAVYYCTLWLRRGLDYWGQGTLVTVSSASTKGPSVFPLAPSSKSTSGGTAALGCLVKDYFPEPVTVSWNSGALTSGVHTFPAVLQSSGLYSLSSVVTVPSSSLGTQTYICNVNHKPSNTKVDKKVEPKSCDKTHTCPPCPAPELLGGPSVFLFPPKPKDTLMISRTPEVTCVVVDVSHEDPEVKFNWYVDGVEVHNAKTKPREEQYNSTYRVVSVLTVLHQDWLNGKEYKCKVSNKALPAPIEKTISKAKGQPREPQVYTLPPSRDELTKNQVSLTCLVKGFYPSDIAVEWESNGQPENNYKTTPPVLDSDGSFFLYSKLTVDKSRWQQGNVFSCSVMHEALHNHYTQKSLSLSPGK

SEQ ID NO: 88 - protein, 449 aa, synthetic construct
  REGION 1..449: note = Synthetic
QVQLQESGPGLVKPSQTLSLTCSVTGYSITSGYYWNWIRQPPGKGLEWMGYITFDGANNYNPSLKNRVSISRDTSKNQFSLKLSSVTAEDTATYYCTRSSYDYDVLDYWGQGTTVTVSSASTKGPSVFPLAPSSKSTSGGTAALGCLVKDYFPEPVTVSWNSGALTSGVHTFPAVLQSSGLYSLSSVVTVPSSSLGTQTYICNVNHKPSNTKVDKKVEPKSCDKTHTCPPCPAPELLGGPSVFLFPPKPKDTLMISRTPEVTCVVVDVSHEDPEVKFNWYVDGVEVHNAKTKPREEQYNSTYRVVSVLTVLHQDWLNGKEYKCKVSNKALPAPIEKTISKAKGQPREPQVYTLPPSRDELTKNQVSLTCLVKGFYPSDIAVEWESNGQPENNYKTTPPVLDSDGSFFLYSKLTVDKSRWQQGNVFSCSVMHEALHNHYTQKSLSLSPGK

SEQ ID NO: 89 - protein, 214 aa, synthetic construct
  REGION 1..214: note = Synthetic
DIQMTQSPSSLSASVGDRVTITCRASQDISNFLNWYQQKPGQPVKLLIYYTSRLHSGVPSRFSGSGSGTDFTLTISSLQPEDFATYFCQQGHTLPYTFGQGTKLEIKRTVAAPSVFIFPPSDEQLKSGTASVVCLLNNFYPREAKVQWKVDNALQSGNSQESVTEQDSKDSTYSLSSTLTLSKADYEKHKVYACEVTHQGLSSPVTKSFNRGEC

SEQ ID NO: 90 - protein, 214 aa, synthetic construct
  REGION 1..214: note = Synthetic
DIQMTQSPSSLSASVGDRVTITCRASQDISNFLNWYQQKPGQPVKLLIYYTSRLHSGVPSRFSGSGSGTDFTLTISSLQPEDFATYYCQQGHTLPYTFGQGTKLEIKRTVAAPSVFIFPPSDEQLKSGTASVVCLLNNFYPREAKVQWKVDNALQSGNSQESVTEQDSKDSTYSLSSTLTLSKADYEKHKVYACEVTHQGLSSPVTKSFNRGEC

SEQ ID NO: 91 - protein, 449 aa, synthetic construct
  REGION 1..449: note = Synthetic
QVQLQESGPGLVKPSQTLSLTCTVTGYSITSGYYWNWIRQPPGKGLEWIGYITFDGANNYNPSLKNRVSISRDTSKNQFSLKLSSVTAEDTATYYCTRSSYDYDVLDYWGQGTTVTVSSASTKGPSVFPLAPSSKSTSGGTAALGCLVKDYFPEPVTVSWNSGALTSGVHTFPAVLQSSGLYSLSSVVTVPSSSLGTQTYICNVNHKPSNTKVDKKVEPKSCDKTHTCPPCPAPELLGGPSVFLFPPKPKDTLMISRTPEVTCVVVDVSHEDPEVKFNWYVDGVEVHNAKTKPREEQYNSTYRVVSVLTVLHQDWLNGKEYKCKVSNKALPAPIEKTISKAKGQPREPQVYTLPPSRDELTKNQVSLTCLVKGFYPSDIAVEWESNGQPENNYKTTPPVLDSDGSFFLYSKLTVDKSRWQQGNVFSCSVMHEALHNHYTQKSLSLSPGK

SEQ ID NO: 92 - protein, 450 aa, synthetic construct
  REGION 1..450: note = Synthetic
QVQLVQSGAEVKKPGASVKVSCKASGYSFTDYYINWVRQAPGQGLEWMGWIYPGSGNTRYSERFKGRVTITRDTSASTAYMELSSLRSEDTAVYYCAREDYYPYHGMDYWGQGTLVTVSSASTKGPSVFPLAPSSKSTSGGTAALGCLVKDYFPEPVTVSWNSGALTSGVHTFPAVLQSSGLYSLSSVVTVPSSSLGTQTYICNVNHKPSNTKVDKKVEPKSCDKTHTCPPCPAPELLGGPSVFLFPPKPKDTLMISRTPEVTCVVVDVSHEDPEVKFNWYVDGVEVHNAKTKPREEQYNSTYRVVSVLTVLHQDWLNGKEYKCKVSNKALPAPIEKTISKAKGQPREPQVYTLPPSRDELTKNQVSLTCLVKGFYPSDIAVEWESNGQPENNYKTTPPVLDSDGSFFLYSKLTVDKSRWQQGNVFSCSVMHEALHNHYTQKSLSLSPGK

SEQ ID NO: 93 - protein, 218 aa, synthetic construct
  REGION 1..218: note = Synthetic
DIVLTQSPDSLAVSLGERATINCRASESVDGYDNSFMHWYQQKPGQPPKLLIFRASNLESGVPDRFSGSGSRTDFTLTISSLQAEDVAVYYCQQSSEDPWTFGQGTKLEIKRTVAAPSVFIFPPSDEQLKSGTASVVCLLNNFYPREAKVQWKVDNALQSGNSQESVTEQDSKDSTYSLSSTLTLSKADYEKHKVYACEVTHQGLSSPVTKSFNRGEC

SEQ ID NO: 94 - protein, 450 aa, synthetic construct
  REGION 1..450: note = Synthetic
QVQLVQSGAEVKKPGASVKVSCKASGYSFTDYDINWVRQAPGQGLEWMGWIYPGSGNTRYSERFKGRVTITRDTSASTAYMELSSLRSEDTAVYYCAREDYYPYHGMDYWGQGTLVTVSSASTKGPSVFPLAPSSKSTSGGTAALGCLVKDYFPEPVTVSWNSGALTSGVHTFPAVLQSSGLYSLSSVVTVPSSSLGTQTYICNVNHKPSNTKVDKKVEPKSCDKTHTCPPCPAPELLGGPSVFLFPPKPKDTLMISRTPEVTCVVVDVSHEDPEVKFNWYVDGVEVHNAKTKPREEQYNSTYRVVSVLTVLHQDWLNGKEYKCKVSNKALPAPIEKTISKAKGQPREPQVYTLPPSRDELTKNQVSLTCLVKGFYPSDIAVEWESNGQPENNYKTTPPVLDSDGSFFLYSKLTVDKSRWQQGNVFSCSVMHEALHNHYTQKSLSLSPGK

SEQ ID NO: 95 - protein, 218 aa, synthetic construct
  REGION 1..218: note = Synthetic
DIVMTQSPDSLAVSLGERATINCRASESVDGYDNSFMHWYQQKPGQPPKLLIFRASNLESGVPDRFSGSGSGTDFTLTISSLQAEDVAVYYCQQSSEDPWTFGQGTKLEIKRTVAAPSVFIFPPSDEQLKSGTASVVCLLNNFYPREAKVQWKVDNALQSGNSQESVTEQDSKDSTYSLSSTLTLSKADYEKHKVYACEVTHQGLSSPVTKSFNRGEC

SEQ ID NO: 96 - protein, 108 aa, synthetic construct
  REGION 1..108: note = Synthetic
ASTKGPSVFPLAPSSKSTSGGTAALGCLVKDYFPEPVTVSWNSGALTSGVHTFPAVLQSSGLYSLSSVVTVPSSSLGTQTYICNVNHKPSNTKVDKKVEPKSCDKTHT

SEQ ID NO: 97 - protein, 225 aa, synthetic construct
  REGION 1..225: note = Synthetic
EVQLVQSGSELKKPGASVKVSCTASGFNIKDDYMYWVRQPPGKGLEWIGWIDPETGDTEYASKFQDRVTVTADTSTNTAYMELSSLRSEDTAVYYCTLWLRRGLDYWGQGTLVTVSSASTKGPSVFPLAPSSKSTSGGTAALGCLVKDYFPEPVTVSWNSGALTSGVHTFPAVLQSSGLYSLSSVVTVPSSSLGTQTYICNVNHKPSNTKVDKKVEPKSCDKTHT

SEQ ID NO: 98 - protein, 225 aa, synthetic construct
  REGION 1..225: note = Synthetic
EVQLVQSGSELKKPGASVKVSCTASGFNIKDDYMYWVRQPPGKGLEWIGWIDPESGDTEYASKFQDRVTVTADTSTNTAYMELSSLRSEDTAVYYCTLWLRRGLDYWGQGTLVTVSSASTKGPSVFPLAPSSKSTSGGTAALGCLVKDYFPEPVTVSWNSGALTSGVHTFPAVLQSSGLYSLSSVVTVPSSSLGTQTYICNVNHKPSNTKVDKKVEPKSCDKTHT

SEQ ID NO: 99 - protein, 225 aa, synthetic construct
  REGION 1..225: note = Synthetic
EVQLVQSGSELKKPGASVKVSCTASGFNIKDDYMYWVRQPPGKGLEWIGWIDPENGDTEYASKFQDRVTVTADTSTNTAYMELSSLRSEDTAVYYCTLWLRRGLDYWGQGTLVTVSSASTKGPSVFPLAPSSKSTSGGTAALGCLVKDYFPEPVTVSWNSGALTSGVHTFPAVLQSSGLYSLSSVVTVPSSSLGTQTYICNVNHKPSNTKVDKKVEPKSCDKTHT

SEQ ID NO: 100 - protein, 227 aa, synthetic construct
  REGION 1..227: note = Synthetic
QVQLQESGPGLVKPSQTLSLTCSVTGYSITSGYYWNWIRQPPGKGLEWMGYITFDGANNYNPSLKNRVSISRDTSKNQFSLKLSSVTAEDTATYYCTRSSYDYDVLDYWGQGTTVTVSSASTKGPSVFPLAPSSKSTSGGTAALGCLVKDYFPEPVTVSWNSGALTSGVHTFPAVLQSSGLYSLSSVVTVPSSSLGTQTYICNVNHKPSNTKVDKKVEPKSCDKTHT

SEQ ID NO: 101 - protein, 227 aa, synthetic construct
  REGION 1..227: note = Synthetic
QVQLQESGPGLVKPSQTLSLTCTVTGYSITSGYYWNWIRQPPGKGLEWIGYITFDGANNYNPSLKNRVSISRDTSKNQFSLKLSSVTAEDTATYYCTRSSYDYDVLDYWGQGTTVTVSSASTKGPSVFPLAPSSKSTSGGTAALGCLVKDYFPEPVTVSWNSGALTSGVHTFPAVLQSSGLYSLSSVVTVPSSSLGTQTYICNVNHKPSNTKVDKKVEPKSCDKTHT

SEQ ID NO: 102 - protein, 228 aa, synthetic construct
  REGION 1..228: note = Synthetic
QVQLVQSGAEVKKPGASVKVSCKASGYSFTDYYINWVRQAPGQGLEWMGWIYPGSGNTRYSERFKGRVTITRDTSASTAYMELSSLRSEDTAVYYCAREDYYPYHGMDYWGQGTLVTVSSASTKGPSVFPLAPSSKSTSGGTAALGCLVKDYFPEPVTVSWNSGALTSGVHTFPAVLQSSGLYSLSSVVTVPSSSLGTQTYICNVNHKPSNTKVDKKVEPKSCDKTHT

SEQ ID NO: 103 - protein, 228 aa, synthetic construct
  REGION 1..228: note = Synthetic
QVQLVQSGAEVKKPGASVKVSCKASGYSFTDYDINWVRQAPGQGLEWMGWIYPGSGNTRYSERFKGRVTITRDTSASTAYMELSSLRSEDTAVYYCAREDYYPYHGMDYWGQGTLVTVSSASTKGPSVFPLAPSSKSTSGGTAALGCLVKDYFPEPVTVSWNSGALTSGVHTFPAVLQSSGLYSLSSVVTVPSSSLGTQTYICNVNHKPSNTKVDKKVEPKSCDKTHT

SEQ ID NO: 104 - protein, 19 aa, synthetic construct
  REGION 1..19: note = Synthetic
MGWSCIILFLVATATGVHS

SEQ ID NO: 105 - protein, 760 aa, Homo sapiens
MMDQARSAFSNLFGGEPLSYTRFSLARQVDGDNSHVEMKLAVDEEENADNNTKANVTKPKRCSGSICYGTIAVIVFFLIGFMIGYLGYCKGVEPKTECERLAGTESPVREEPGEDFPAARRLYWDDLKRKLSEKLDSTDFTGTIKLLNENSYVPREAGSQKDENLALYVENQFREFKLSKVWRDQHFVKIQVKDSAQNSVIIVDKNGRLVYLVENPGGYVAYSKAATVTGKLVHANFGTKKDFEDLYTPVNGSIVIVRAGKITFAEKVANAESLNAIGVLIYMDQTKFPIVNAELSFFGHAHLGTGDPYTPGFPSFNHTQFPPSRSSGLPNIPVQTISRAAAEKLFGNMEGDCPSDWKTDSTCRMVTSESKNVKLTVSNVLKEIKILNIFGVIKGFVEPDHYVVVGAQRDAWGPGAAKSGVGTALLLKLAQMFSDMVLKDGFQPSRSIIFASWSAGDFGSVGATEWLEGYLSSLHLKAFTYINLDKAVLGTSNFKVSASPLLYTLIEKTMQNVKHPVTGQFLYQDSNWASKVEKLTLDNAAFPFLAYSGIPAVSFCFCEDTDYPYLGTTMDTYKELIERIPELNKVARAAAEVAGQFVIKLTHDVELNLDYERYNSQLLSFVRDLNQYRADIKEMGLSLQWLYSARGDFFRATSRLTTDFGNAEKTDRFVMKKLNDRVMRVEYHFLSPYVSPKESPFRHVFWGSGSHTLPALLENLKLRKQNNGAFNETLFRNQLALATWTIQGAANALSGDVWDIDNEF

SEQ ID NO: 106 - protein, 760 aa, Macaca mulatta
MMDQARSAFSNLFGGEPLSYTRFSLARQVDGDNSHVEMKLGVDEEENTDNNTKPNGTKPKRCGGNICYGTIAVIIFFLIGFMIGYLGYCKGVEPKTECERLAGTESPAREEPEEDFPAAPRLYWDDLKRKLSEKLDTTDFTSTIKLLNENLYVPREAGSQKDENLALYIENQFREFKLSKVWRDQHFVKIQVKDSAQNSVIIVDKNGGLVYLVENPGGYVAYSKAATVTGKLVHANFGTKKDFEDLDSPVNGSIVIVRAGKITFAEKVANAESLNAIGVLIYMDQTKFPIVKADLSFFGHAHLGTGDPYTPGFPSFNHTQFPPSQSSGLPNIPVQTISRAAAEKLFGNMEGDCPSDWKTDSTCKMVTSENKSVKLTVSNVLKETKILNIFGVIKGFVEPDHYVVVGAQRDAWGPGAAKSSVGTALLLKLAQMFSDMVLKDGFQPSRSIIFASWSAGDFGSVGATEWLEGYLSSLHLKAFTYINLDKAVLGTSNFKVSASPLLYTLIEKTMQDVKHPVTGRSLYQDSNWASKVEKLTLDNAAFPFLAYSGIPAVSFCFCEDTDYPYLGTTMDTYKELVERIPELNKVARAAAEVAGQFVIKLTHDTELNLDYERYNSQLLLFLRDLNQYRADVKEMGLSLQWLYSARGDFFRATSRLTTDFRNAEKRDKFVMKKLNDRVMRVEYYFLSPYVSPKESPFRHVFWGSGSHTLSALLESLKLRRQNNSAFNETLFRNQLALATWTIQGAANALSGDVWDIDNEF

SEQ ID NO: 107 - protein, 760 aa, Macaca fascicularis
MMDQARSAFSNLFGGEPLSYTRFSLARQVDGDNSHVEMKLGVDEEENTDNNTKANGTKPKRCGGNICYGTIAVIIFFLIGFMIGYLGYCKGVEPKTECERLAGTESPAREEPEEDFPAAPRLYWDDLKRKLSEKLDTTDFTSTIKLLNENLYVPREAGSQKDENLALYIENQFREFKLSKVWRDQHFVKIQVKDSAQNSVIIVDKNGGLVYLVENPGGYVAYSKAATVTGKLVHANFGTKKDFEDLDSPVNGSIVIVRAGKITFAEKVANAESLNAIGVLIYMDQTKFPIVKADLSFFGHAHLGTGDPYTPGFPSFNHTQFPPSQSSGLPNIPVQTISRAAAEKLFGNMEGDCPSDWKTDSTCKMVTSENKSVKLTVSNVLKETKILNIFGVIKGFVEPDHYVVVGAQRDAWGPGAAKSSVGTALLLKLAQMFSDMVLKDGFQPSRSIIFASWSAGDFGSVGATEWLEGYLSSLHLKAFTYINLDKAVLGTSNFKVSASPLLYTLIEKTMQDVKHPVTGRSLYQDSNWASKVEKLTLDNAAFPFLAYSGIPAVSFCFCEDTDYPYLGTTMDTYKELVERIPELNKVARAAAEVAGQFVIKLTHDTELNLDYERYNSQLLLFLRDLNQYRADVKEMGLSLQWLYSARGDFFRATSRLTTDFRNAEKRDKFVMKKLNDRVMRVEYYFLSPYVSPKESPFRHVFWGSGSHTLSALLESLKLRRQNNSAFNETLFRNQLALATWTIQGAANALSGDVWDIDNEF

SEQ ID NO: 108 - protein, 763 aa, Mus musculus
MMDQARSAFSNLFGGEPLSYTRFSLARQVDGDNSHVEMKLAADEEENADNNMKASVRKPKRFNGRLCFAAIALVIFFLIGFMSGYLGYCKRVEQKEECVKLAETEETDKSETMETEDVPTSSRLYWADLKTLLSEKLNSIEFADTIKQLSQNTYTPREAGSQKDESLAYYIENQFHEFKFSKVWRDEHYVKIQVKSSIGQNMVTIVQSNGNLDPVESPEGYVAFSKPTEVSGKLVHANFGTKKDFEELSYSVNGSLVIVRAGEITFAEKVANAQSFNAIGVLIYMDKNKFPVVEADLALFGHAHLGTGDPYTPGFPSFNHTQFPPSQSSGLPNIPVQTISRAAAEKLFGKMEGSCPARWNIDSSCKLELSQNQNVKLIVKNVLKERRILNIFGVIKGYEEPDRYVVVGAQRDALGAGVAAKSSVGTGLLLKLAQVFSDMISKDGFRPSRSIIFASWTAGDFGAVGATEWLEGYLSSLHLKAFTYINLDKVVLGTSNFKVSASPLLYTLMGKIMQDVKHPVDGKSLYRDSNWISKVEKLSFDNAAYPFLAYSGIPAVSFCFCEDADYPYLGTRLDTYEALTQKVPQLNQMVRTAAEVAGQLIIKLTHDVELNLDYEMYNSKLLSFMKDLNQFKTDIRDMGLSLQWLYSARGDYFRATSRLTTDFHNAEKTNRFVMREINDRIMKVEYHFLSPYVSPRESPFRHIFWGSGSHTLSALVENLKLRQKNITAFNETLFRNQLALATWTIQGVANALSGDIWNIDNEF

SEQ ID NO: 109 - protein, 197 aa, synthetic construct
  REGION 1..197: note = Synthetic
FVKIQVKDSAQNSVIIVDKNGRLVYLVENPGGYVAYSKAATVTGKLVHANFGTKKDFEDLYTPVNGSIVIVRAGKITFAEKVANAESLNAIGVLIYMDQTKFPIVNAELSFFGHAHLGTGDPYTPGFPSFNHTQFPPSRSSGLPNIPVQTISRAAAEKLFGNMEGDCPSDWKTDSTCRMVTSESKNVKLTVSNVLKE

SEQ ID NO: 110 - protein, 5 aa, synthetic construct
  REGION 1..5: note = Synthetic
SYWMH

SEQ ID NO: 111 - protein, 17 aa, synthetic construct
  REGION 1..17: note = Synthetic
EINPTNGRTNYIEKFKS

SEQ ID NO: 112 - protein, 7 aa, synthetic construct
  REGION 1..7: note = Synthetic
GTRAYHY

SEQ ID NO: 113 - protein, 11 aa, synthetic construct
  REGION 1..11: note = Synthetic
RASDNLYSNLA

SEQ ID NO: 114 - protein, 7 aa, synthetic construct
  REGION 1..7: note = Synthetic
DATNLAD

SEQ ID NO: 115 - protein, 9 aa, synthetic construct
  REGION 1..9: note = Synthetic
QHFWGTPLT

SEQ ID NO: 116 - protein, 7 aa, synthetic construct
  REGION 1..7: note = Synthetic
GYTFTSY

SEQ ID NO: 117 - protein, 6 aa, synthetic construct
  REGION 1..6: note = Synthetic
NPTNGR

SEQ ID NO: 118 - protein, 6 aa, synthetic construct
  REGION 1..6: note = Synthetic
TSYWMH

SEQ ID NO: 119 - protein, 13 aa, synthetic construct
  REGION 1..13: note = Synthetic
WIGEINPTNGRTN

SEQ ID NO: 120 - protein, 6 aa, synthetic construct
  REGION 1..6: note = Synthetic
ARGTRA

SEQ ID NO: 121 - protein, 7 aa, synthetic construct
  REGION 1..7: note = Synthetic
YSNLAWY

SEQ ID NO: 122 - protein, 10 aa, synthetic construct
  REGION 1..10: note = Synthetic
LLVYDATNLA

SEQ ID NO: 123 - protein, 8 aa, synthetic construct
  REGION 1..8: note = Synthetic
QHFWGTPL

SEQ ID NO: 124 - protein, 116 aa, Mus musculus
QVQLQQPGAELVKPGASVKLSCKASGYTFTSYWMHWVKQRPGQGLEWIGEINPTNGRTNYIEKFKSKATLTVDKSSSTAYMQLSSLTSEDSAVYYCARGTRAYHYWGQGTSVTVSS

SEQ ID NO: 125 - protein, 107 aa, Mus musculus
DIQMTQSPASLSVSVGETVTITCRASDNLYSNLAWYQQKQGKSPQLLVYDATNLADGVPSRFSGSGSGTQYSLKINSLQSEDFGTYYCQHFWGTPLTFGAGTKLELK

SEQ ID NO: 126 - protein, 9 aa, synthetic construct
  REGION 1..9: note = Synthetic
QHFAGTPLT

SEQ ID NO: 127 - protein, 8 aa, synthetic construct
  REGION 1..8: note = Synthetic
QHFAGTPL

SEQ ID NO: 128 - protein, 116 aa, synthetic construct
  REGION 1..116: note = Synthetic
EVQLVQSGAEVKKPGASVKVSCKASGYTFTSYWMHWVRQAPGQRLEWIGEINPTNGRTNYIEKFKSRATLTVDKSASTAYMELSSLRSEDTAVYYCARGTRAYHYWGQGTMVTVSS

SEQ ID NO: 129 - protein, 107 aa, synthetic construct
  REGION 1..107: note = Synthetic
DIQMTQSPSSLSASVGDRVTITCRASDNLYSNLAWYQQKPGKSPKLLVYDATNLADGVPSRFSGSGSGTDYTLTISSLQPEDFATYYCQHFWGTPLTFGQGTKVEIK

SEQ ID NO: 130 - protein, 13993 aa, Homo sapiens
TCCTGGCATCAGTTACTGTGTTGACTCACTCAGTGTTGGGATCACTCACTTTCCCCCTACAGGACTCAGATCTGGGAGGCAATTACCTTCGGAGAAAAACGAATAGGAAAAACTGAAGTGTTACTTTTTTTAAAGCTGCTGAAGTTTGTTGGTTTCTCATTGTTTTTAAGCCTACTGGAGCAATAAAGTTTGAAGAACTTTTACCAGGTTTTTTTTATCGCTGCCTTGATATACACTTTTCAAAATGCTTTGGTGGGAAGAAGTAGAGGACTGTTATGAAAGAGAAGATGTTCAAAAGAAAACATTCACAAAATGGGTAAATGCACAATTTTCTAAGTTTGGGAAGCAGCATATTGAGAACCTCTTCAGTGACCTACAGGATGGGAGGCGCCTCCTAGACCTCCTCGAAGGCCTGACAGGGCAAAAACTGCCAAAAGAAAAAGGATCCACAAGAGTTCATGCCCTGAACAATGTCAACAAGGCACTGCGGGTTTTGCAGAACAATAATGTTGATTTAGTGAATATTGGAAGTACTGACATCGTAGATGGAAATCATAAACTGACTCTTGGTTTGATTTGGAATATAATCCTCCACTGGCAGGTCAAAAATGTAATGAAAAATATCATGGCTGGATTGCAACAAACCAACAGTGAAAAGATTCTCCTGAGCTGGGTCCGACAATCAACTCGTAATTATCCACAGGTTAATGTAATCAACTTCACCACCAGCTGGTCTGATGGCCTGGCTTTGAATGCTCTCATCCATAGTCATAGGCCAGACCTATTTGACTGGAATAGTGTGGTTTGCCAGCAGTCAGCCACACAACGACTGGAACATGCATTCAACATCGCCAGATATCAATTAGGCATAGAGAAACTACTCGATCCTGAAGATGTTGATACCACCTATCCAGATAAGAAGTCCATCTTAATGTACATCACATCACTCTTCCAAGTTTTGCCTCAACAAGTGAGCATTGAAGCCATCCAGGAAGTGGAAATGTTGCCAAGGCCACCTAAAGTGACTAAAGAAGAACATTTTCAGTTACATCATCAAATGCACTATTCTCAACAGATCACGGTCAGTCTAGCACAGGGATATGAGAGAACTTCTTCCCCTAAGCCTCGATTCAAGAGCTATGCCTACACACAGGCTGCTTATGTCACCACCTCTGACCCTACACGGAGCCCATTTCCTTCACAGCATTTGGAAGCTCCTGAAGACAAGTCATTTGGCAGTTCATTGATGGAGAGTGAAGTAAACCTGGACCGTTATCAAACAGCTTTAGAAGAAGTATTATCGTGGCTTCTTTCTGCTGAGGACACATTGCAAGCACAAGGAGAGATTTCTAATGATGTGGAAGTGGTGAAAGACCAGTTTCATACTCATGAGGGGTACATGATGGATTTGACAGCCCATCAGGGCCGGGTTGGTAATATTCTACAATTGGGAAGTAAGCTGATTGGAACAGGAAAATTATCAGAAGATGAAGAAACTGAAGTACAAGAGCAGATGAATCTCCTAAATTCAAGATGGGAATGCCTCAGGGTAGCTAGCATGGAAAAACAAAGCAATTTACATAGAGTTTTAATGGATCTCCAGAATCAGAAACTGAAAGAGTTGAATGACTGGCTAACAAAAACAGAAGAAAGAACAAGGAAAATGGAGGAAGAGCCTCTTGGACCTGATCTTGAAGACCTAAAACGCCAAGTACAACAACATAAGGTGCTTCAAGAAGATCTAGAACAAGAACAAGTCAGGGTCAATTCTCTCACTCACATGGTGGTGGTAGTTGATGAATCTAGTGGAGATCACGCAACTGCTGCTTTGGAAGAACAACTTAAGGTATTGGGAGATCGATGGGCAAACATCTGTAGATGGACAGAAGACCGCTGGGTTCTTTTACAAGACATCCTTCTCAAATGGCAACGTCTTACTGAAGAACAGTGCCTTTTTAGTGCATGGCTTTCAGAAAAAGAAGATGCAGTGAACAAGATTCACACAACTGGCTTTAAAGATCAAAATGAAATGTTATCAAGTCTTCAAAAACTGGCCGTTTTAAAAGCGGATCTAGAAAAGAAAAAGCAATCCATGGGCAAACTGTATTCACTCAAACAAGATCTTCTTTCAACACTGAAGAATAAGTCAGTGACCCAGAAGACGGAAGCATGGCTGGATAACTTTGCCCGGTGTTGGGATAATTTAGTCCAAAAACTTGAAAAGAGTACAGCACAGATTTCACAGGCTGTCACCACCACTCAGCCATCACTAACACAGACAACTGTAATGGAAACAGTAACTACGGTGACCACAAGGGAACAGATCCTGGTAAAGCATGCTCAAGAGGAACTTCCACCACCACCTCCCCAAAAGAAGAGGCAGATTACTGTGGATTCTGAAATTAGGAAAAGGTTGGATGTTGATATAACTGAACTTCACAGCTGGATTACTCGCTCAGAAGCTGTGTTGCAGAGTCCTGAATTTGCAATCTTTCGGAAGGAAGGCAACTTCTCAGACTTAAAAGAAAAAGTCAATGCCATAGAGCGAGAAAAAGCTGAGAAGTTCAGAAAACTGCAAGATGCCAGCAGATCAGCTCAGGCCCTGGTGGAACAGATGGTGAATGAGGGTGTTAATGCAGATAGCATCAAACAAGCCTCAGAACAACTGAACAGCCGGTGGATCGAATTCTGCCAGTTGCTAAGTGAGAGACTTAACTGGCTGGAGTATCAGAACAACATCATCGCTTTCTATAATCAGCTACAACAATTGGAGCAGATGACAACTACTGCTGAAAACTGGTTGAAAATCCAACCCACCACCCCATCAGAGCCAACAGCAATTAAAAGTCAGTTAAAAATTTGTAAGGATGAAGTCAACCGGCTATCAGGTCTTCAACCTCAAATTGAACGATTAAAAATTCAAAGCATAGCCCTGAAAGAGAAAGGACAAGGACCCATGTTCCTGGATGCAGACTTTGTGGCCTTTACAAATCATTTTAAGCAAGTCTTTTCTGATGTGCAGGCCAGAGAGAAAGAGCTACAGACAATTTTTGACACTTTGCCACCAATGCGCTATCAGGAGACCATGAGTGCCATCAGGACATGGGTCCAGCAGTCAGAAACCAAACTCTCCATACCTCAACTTAGTGTCACCGACTATGAAATCATGGAGCAGAGACTCGGGGAATTGCAGGCTTTACAAAGTTCTCTGCAAGAGCAACAAAGTGGCCTATACTATCTCAGCACCACTGTGAAAGAGATGTCGAAGAAAGCGCCCTCTGAAATTAGCCGGAAATATCAATCAGAATTTGAAGAAATTGAGGGACGCTGGAAGAAGCTCTCCTCCCAGCTGGTTGAGCATTGTCAAAAGCTAGAGGAGCAAATGAATAAACTCCGAAAAATTCAGAATCACATACAAACCCTGAAGAAATGGATGGCTGAAGTTGATGTTTTTCTGAAGGAGGAATGGCCTGCCCTTGGGGATTCAGAAATTCTAAAAAAGCAGCTGAAACAGTGCAGACTTTTAGTCAGTGATATTCAGACAATTCAGCCCAGTCTAAACAGTGTCAATGAAGGTGGGCAGAAGATAAAGAATGAAGCAGAGCCAGAGTTTGCTTCGAGACTTGAGACAGAACTCAAAGAACTTAACACTCAGTGGGATCACATGTGCCAACAGGTCTATGCCAGAAAGGAGGCCTTGAAGGGAGGTTTGGAGAAAACTGTAAGCCTCCAGAAAGATCTATCAGAGATGCACGAATGGATGACACAAGCTGAAGAAGAGTATCTTGAGAGAGATTTTGAATATAAAACTCCAGATGAATTACAGAAAGCAGTTGAAGAGATGAAGAGAGCTAAAGAAGAGGCCCAACAAAAAGAAGCGAAAGTGAAACTCCTTACTGAGTCTGTAAATAGTGTCATAGCTCAAGCTCCACCTGTAGCACAAGAGGCCTTAAAAAAGGAACTTGAAACTCTAACCACCAACTACCAGTGGCTCTGCACTAGGCTGAATGGGAAATGCAAGACTTTGGAAGAAGTTTGGGCATGTTGGCATGAGTTATTGTCATACTTGGAGAAAGCAAACAAGTGGCTAAATGAAGTAGAATTTAAACTTAAAACCACTGAAAACATTCCTGGCGGAGCTGAGGAAATCTCTGAGGTGCTAGATTCACTTGAAAATTTGATGCGACATTCAGAGGATAACCCAAATCAGATTCGCATATTGGCACAGACCCTAACAGATGGCGGAGTCATGGATGAGCTAATCAATGAGGAACTTGAGACATTTAATTCTCGTTGGAGGGAACTACATGAAGAGGCTGTAAGGAGGCAAAAGTTGCTTGAACAGAGCATCCAGTCTGCCCAGGAGACTGAAAAATCCTTACACTTAATCCAGGAGTCCCTCACATTCATTGACAAGCAGTTGGCAGCTTATATTGCAGACAAGGTGGACGCAGCTCAAATGCCTCAGGAAGCCCAGAAAATCCAATCTGATTTGACAAGTCATGAGATCAGTTTAGAAGAAATGAAGAAACATAATCAGGGGAAGGAGGCTGCCCAAAGAGTCCTGTCTCAGATTGATGTTGCACAGAAAAAATTACAAGATGTCTCCATGAAGTTTCGATTATTCCAGAAACCAGCCAATTTTGAGCAGCGTCTACAAGAAAGTAAGATGATTTTAGATGAAGTGAAGATGCACTTGCCTGCATTGGAAACAAAGAGTGTGGAACAGGAAGTAGTACAGTCACAGCTAAATCATTGTGTGAACTTGTATAAAAGTCTGAGTGAAGTGAAGTCTGAAGTGGAAATGGTGATAAAGACTGGACGTCAGATTGTACAGAAAAAGCAGACGGAAAATCCCAAAGAACTTGATGAAAGAGTAACAGCTTTGAAATTGCATTATAATGAGCTGGGAGCAAAGGTAACAGAAAGAAAGCAACAGTTGGAGAAATGCTTGAAATTGTCCCGTAAGATGCGAAAGGAAATGAATGTCTTGACAGAATGGCTGGCAGCTACAGATATGGAATTGACAAAGAGATCAGCAGTTGAAGGAATGCCTAGTAATTTGGATTCTGAAGTTGCCTGGGGAAAGGCTACTCAAAAAGAGATTGAGAAACAGAAGGTGCACCTGAAGAGTATCACAGAGGTAGGAGAGGCCTTGAAAACAGTTTTGGGCAAGAAGGAGACGTTGGTGGAAGATAAACTCAGTCTTCTGAATAGTAACTGGATAGCTGTCACCTCCCGAGCAGAAGAGTGGTTAAATCTTTTGTTGGAATACCAGAAACACATGGAAACTTTTGACCAGAATGTGGACCACATCACAAAGTGGATCATTCAGGCTGACACACTTTTGGATGAATCAGAGAAAAAGAAACCCCAGCAAAAAGAAGACGTGCTTAAGCGTTTAAAGGCAGAACTGAATGACATACGCCCAAAGGTGGACTCTACACGTGACCAAGCAGCAAACTTGATGGCAAACCGCGGTGACCACTGCAGGAAATTAGTAGAGCCCCAAATCTCAGAGCTCAACCATCGATTTGCAGCCATTTCACACAGAATTAAGACTGGAAAGGCCTCCATTCCTTTGAAGGAATTGGAGCAGTTTAACTCAGATATACAAAAATTGCTTGAACCACTGGAGGCTGAAATTCAGCAGGGGGTGAATCTGAAAGAGGAAGACTTCAATAAAGATATGAATGAAGACAATGAGGGTACTGTAAAAGAATTGTTGCAAAGAGGAGACAACTTACAACAAAGAATCACAGATGAGAGAAAGCGAGAGGAAATAAAGATAAAACAGCAGCTGTTACAGACAAAACATAATGCTCTCAAGGATTTGAGGTCTCAAAGAAGAAAAAAGGCTCTAGAAATTTCTCATCAGTGGTATCAGTACAAGAGGCAGGCTGATGATCTCCTGAAATGCTTGGATGACATTGAAAAAAAATTAGCCAGCCTACCTGAGCCCAGAGATGAAAGGAAAATAAAGGAAATTGATCGGGAATTGCAGAAGAAGAAAGAGGAGCTGAATGCAGTGCGTAGGCAAGCTGAGGGCTTGTCTGAGGATGGGGCCGCAATGGCAGTGGAGCCAACTCAGATCCAGCTCAGCAAGCGCTGGCGGGAAATTGAGAGCAAATTTGCTCAGTTTCGAAGACTCAACTTTGCACAAATTCACACTGTCCGTGAAGAAACGATGATGGTGATGACTGAAGACATGCCTTTGGAAATTTCTTATGTGCCTTCTACTTATTTGACTGAAATCACTCATGTCTCACAAGCCCTATTAGAAGTGGAACAACTTCTCAATGCTCCTGACCTCTGTGCTAAGGACTTTGAAGATCTCTTTAAGCAAGAGGAGTCTCTGAAGAATATAAAAGATAGTCTACAACAAAGCTCAGGTCGGATTGACATTATTCATAGCAAGAAGACAGCAGCATTGCAAAGTGCAACGCCTGTGGAAAGGGTGAAGCTACAGGAAGCTCTCTCCCAGCTTGATTTCCAATGGGAAAAAGTTAACAAAATGTACAAGGACCGACAAGGGCGATTTGACAGATCTGTTGAGAAATGGCGGCGTTTTCATTATGATATAAAGATATTTAATCAGTGGCTAACAGAAGCTGAACAGTTTCTCAGAAAGACACAAATTCCTGAGAATTGGGAACATGCTAAATACAAATGGTATCTTAAGGAACTCCAGGATGGCATTGGGCAGCGGCAAACTGTTGTCAGAACATTGAATGCAACTGGGGAAGAAATAATTCAGCAATCCTCAAAAACAGATGCCAGTATTCTACAGGAAAAATTGGGAAGCCTGAATCTGCGGTGGCAGGAGGTCTGCAAACAGCTGTCAGACAGAAAAAAGAGGCTAGAAGAACAAAAGAATATCTTGTCAGAATTTCAAAGAGATTTAAATGAATTTGTTTTATGGTTGGAGGAAGCAGATAACATTGCTAGTATCCCACTTGAACCTGGAAAAGAGCAGCAACTAAAAGAAAAGCTTGAGCAAGTCAAGTTACTGGTGGAAGAGTTGCCCCTGCGCCAGGGAATTCTCAAACAATTAAATGAAACTGGAGGACCCGTGCTTGTAAGTGCTCCCATAAGCCCAGAAGAGCAAGATAAACTTGAAAATAAGCTCAAGCAGACAAATCTCCAGTGGATAAAGGTTTCCAGAGCTTTACCTGAGAAACAAGGAGAAATTGAAGCTCAAATAAAAGACCTTGGGCAGCTTGAAAAAAAGCTTGAAGACCTTGAAGAGCAGTTAAATCATCTGCTGCTGTGGTTATCTCCTATTAGGAATCAGTTGGAAATTTATAACCAACCAAACCAAGAAGGACCATTTGACGTTCAGGAAACTGAAATAGCAGTTCAAGCTAAACAACCGGATGTGGAAGAGATTTTGTCTAAAGGGCAGCATTTGTACAAGGAAAAACCAGCCACTCAGCCAGTGAAGAGGAAGTTAGAAGATCTGAGCTCTGAGTGGAAGGCGGTAAACCGTTTACTTCAAGAGCTGAGGGCAAAGCAGCCTGACCTAGCTCCTGGACTGACCACTATTGGAGCCTCTCCTACTCAGACTGTTACTCTGGTGACACAACCTGTGGTTACTAAGGAAACTGCCATCTCCAAACTAGAAATGCCATCTTCCTTGATGTTGGAGGTACCTGCTCTGGCAGATTTCAACCGGGCTTGGACAGAACTTACCGACTGGCTTTCTCTGCTTGATCAAGTTATAAAATCACAGAGGGTGATGGTGGGTGACCTTGAGGATATCAACGAGATGATCATCAAGCAGAAGGCAACAATGCAGGATTTGGAACAGAGGCGTCCCCAGTTGGAAGAACTCATTACCGCTGCCCAAAATTTGAAAAACAAGACCAGCAATCAAGAGGCTAGAACAATCATTACGGATCGAATTGAAAGAATTCAGAATCAGTGGGATGAAGTACAAGAACACCTTCAGAACCGGAGGCAACAGTTGAATGAAATGTTAAAGGATTCAACACAATGGCTGGAAGCTAAGGAAGAAGCTGAGCAGGTCTTAGGACAGGCCAGAGCCAAGCTTGAGTCATGGAAGGAGGGTCCCTATACAGTAGATGCAATCCAAAAGAAAATCACAGAAACCAAGCAGTTGGCCAAAGACCTCCGCCAGTGGCAGACAAATGTAGATGTGGCAAATGACTTGGCCCTGAAACTTCTCCGGGATTATTCTGCAGATGATACCAGAAAAGTCCACATGATAACAGAGAATATCAATGCCTCTTGGAGAAGCATTCATAAAAGGGTGAGTGAGCGAGAGGCTGCTTTGGAAGAAACTCATAGATTACTGCAACAGTTCCCCCTGGACCTGGAAAAGTTTCTTGCCTGGCTTACAGAAGCTGAAACAACTGCCAATGTCCTACAGGATGCTACCCGTAAGGAAAGGCTCCTAGAAGACTCCAAGGGAGTAAAAGAGCTGATGAAACAATGGCAAGACCTCCAAGGTGAAATTGAAGCTCACACAGATGTTTATCACAACCTGGATGAAAACAGCCAAAAAATCCTGAGATCCCTGGAAGGTTCCGATGATGCAGTCCTGTTACAAAGACGTTTGGATAACATGAACTTCAAGTGGAGTGAACTTCGGAAAAAGTCTCTCAACATTAGGTCCCATTTGGAAGCCAGTTCTGACCAGTGGAAGCGTCTGCACCTTTCTCTGCAGGAACTTCTGGTGTGGCTACAGCTGAAAGATGATGAATTAAGCCGGCAGGCACCTATTGGAGGCGACTTTCCAGCAGTTCAGAAGCAGAACGATGTACATAGGGCCTTCAAGAGGGAATTGAAAACTAAAGAACCTGTAATCATGAGTACTCTTGAGACTGTACGAATATTTCTGACAGAGCAGCCTTTGGAAGGACTAGAGAAACTCTACCAGGAGCCCAGAGAGCTGCCTCCTGAGGAGAGAGCCCAGAATGTCACTCGGCTTCTACGAAAGCAGGCTGAGGAGGTCAATACTGAGTGGGAAAAATTGAACCTGCACTCCGCTGACTGGCAGAGAAAAATAGATGAGACCCTTGAAAGACTCCAGGAACTTCAAGAGGCCACGGATGAGCTGGACCTCAAGCTGCGCCAAGCTGAGGTGATCAAGGGATCCTGGCAGCCCGTGGGCGATCTCCTCATTGACTCTCTCCAAGATCACCTCGAGAAAGTCAAGGCACTTCGAGGAGAAATTGCGCCTCTGAAAGAGAACGTGAGCCACGTCAATGACCTTGCTCGCCAGCTTACCACTTTGGGCATTCAGCTCTCACCGTATAACCTCAGCACTCTGGAAGACCTGAACACCAGATGGAAGCTTCTGCAGGTGGCCGTCGAGGACCGAGTCAGGCAGCTGCATGAAGCCCACAGGGACTTTGGTCCAGCATCTCAGCACTTTCTTTCCACGTCTGTCCAGGGTCCCTGGGAGAGAGCCATCTCGCCAAACAAAGTGCCCTACTATATCAACCACGAGACTCAAACAACTTGCTGGGACCATCCCAAAATGACAGAGCTCTACCAGTCTTTAGCTGACCTGAATAATGTCAGATTCTCAGCTTATAGGACTGCCATGAAACTCCGAAGACTGCAGAAGGCCCTTTGCTTGGATCTCTTGAGCCTGTCAGCTGCATGTGATGCCTTGGACCAGCACAACCTCAAGCAAAATGACCAGCCCATGGATATCCTGCAGATTATTAATTGTTTGACCACTATTTATGACCGCCTGGAGCAAGAGCACAACAATTTGGTCAACGTCCCTCTCTGCGTGGATATGTGTCTGAACTGGCTGCTGAATGTTTATGATACGGGACGAACAGGGAGGATCCGTGTCCTGTCTTTTAAAACTGGCATCATTTCCCTGTGTAAAGCACATTTGGAAGACAAGTACAGATACCTTTTCAAGCAAGTGGCAAGTTCAACAGGATTTTGTGACCAGCGCAGGCTGGGCCTCCTTCTGCATGATTCTATCCAAATTCCAAGACAGTTGGGTGAAGTTGCATCCTTTGGGGGCAGTAACATTGAGCCAAGTGTCCGGAGCTGCTTCCAATTTGCTAATAATAAGCCAGAGATCGAAGCGGCCCTCTTCCTAGACTGGATGAGACTGGAACCCCAGTCCATGGTGTGGCTGCCCGTCCTGCACAGAGTGGCTGCTGCAGAAACTGCCAAGCATCAGGCCAAATGTAACATCTGCAAAGAGTGTCCAATCATTGGATTCAGGTACAGGAGTCTAAAGCACTTTAATTATGACATCTGCCAAAGCTGCTTTTTTTCTGGTCGAGTTGCAAAAGGCCATAAAATGCACTATCCCATGGTGGAATATTGCACTCCGACTACATCAGGAGAAGATGTTCGAGACTTTGCCAAGGTACTAAAAAACAAATTTCGAACCAAAAGGTATTTTGCGAAGCATCCCCGAATGGGCTACCTGCCAGTGCAGACTGTCTTAGAGGGGGACAACATGGAAACTCCCGTTACTCTGATCAACTTCTGGCCAGTAGATTCTGCGCCTGCCTCGTCCCCTCAGCTTTCACACGATGATACTCATTCACGCATTGAACATTATGCTAGCAGGCTAGCAGAAATGGAAAACAGCAATGGATCTTATCTAAATGATAGCATCTCTCCTAATGAGAGCATAGATGATGAACATTTGTTAATCCAGCATTACTGCCAAAGTTTGAACCAGGACTCCCCCCTGAGCCAGCCTCGTAGTCCTGCCCAGATCTTGATTTCCTTAGAGAGTGAGGAAAGAGGGGAGCTAGAGAGAATCCTAGCAGATCTTGAGGAAGAAAACAGGAATCTGCAAGCAGAATATGACCGTCTAAAGCAGCAGCACGAACATAAAGGCCTGTCCCCACTGCCGTCCCCTCCTGAAATGATGCCCACCTCTCCCCAGAGTCCCCGGGATGCTGAGCTCATTGCTGAGGCCAAGCTACTGCGTCAACACAAAGGCCGCCTGGAAGCCAGGATGCAAATCCTGGAAGACCACAATAAACAGCTGGAGTCACAGTTACACAGGCTAAGGCAGCTGCTGGAGCAACCCCAGGCAGAGGCCAAAGTGAATGGCACAACGGTGTCCTCTCCTTCTACCTCTCTACAGAGGTCCGACAGCAGTCAGCCTATGCTGCTCCGAGTGGTTGGCAGTCAAACTTCGGACTCCATGGGTGAGGAAGATCTTCTCAGTCCTCCCCAGGACACAAGCACAGGGTTAGAGGAGGTGATGGAGCAACTCAACAACTCCTTCCCTAGTTCAAGAGGAAGAAATACCCCTGGAAAGCCAATGAGAGAGGACACAATGTAGGAAGTCTTTTCCACATGGCAGATGATTTGGGCAGAGCGATGGAGTCCTTAGTATCAGTCATGACAGATGAAGAAGGAGCAGAATAAATGTTTTACAACTCCTGATTCCCGCATGGTTTTTATAATATTCATACAACAAAGAGGATTAGACAGTAAGAGTTTACAAGAAATAAATCTATATTTTTGTGAAGGGTAGTGGTATTATACTGTAGATTTCAGTAGTTTCTAAGTCTGTTATTGTTTTGTTAACAATGGCAGGTTTTACACGTCTATGCAATTGTACAAAAAAGTTATAAGAAAACTACATGTAAAATCTTGATAGCTAAATAACTTGCCATTTCTTTATATGGAACGCATTTTGGGTTGTTTAAAAATTTATAACAGTTATAAAGAAAGATTGTAAACTAAAGTGTGCTTTATAAAAAAAAGTTGTTTATAAAAACCCCTAAAAACAAAACAAACACACACACACACACATACACACACACACACAAAACTTTGAGGCAGCGCATTGTTTTGCATCCTTTTGGCGTGATATCCATATGAAATTCATGGCTTTTTCTTTTTTTGCATATTAAAGATAAGACTTCCTCTACCACCACACCAAATGACTACTACACACTGCTCATTTGAGAACTGTCAGCTGAGTGGGGCAGGCTTGAGTTTTCATTTCATATATCTATATGTCTATAAGTATATAAATACTATAGTTATATAGATAAAGAGATACGAATTTCTATAGACTGACTTTTTCCATTTTTTAAATGTTCATGTCACATCCTAATAGAAAGAAATTACTTCTAGTCAGTCATCCAGGCTTACCTGCTTGGTCTAGAATGGATTTTTCCCGGAGCCGGAAGCCAGGAGGAAACTACACCACACTAAAACATTGTCTACAGCTCCAGATGTTTCTCATTTTAAACAACTTTCCACTGACAACGAAAGTAAAGTAAAGTATTGGATTTTTTTAAAGGGAACATGTGAATGAATACACAGGACTTATTATATCAGAGTGAGTAATCGGTTGGTTGGTTGATTGATTGATTGATTGATACATTCAGCTTCCTGCTGCTAGCAATGCCACGATTTAGATTTAATGATGCTTCAGTGGAAATCAATCAGAAGGTATTCTGACCTTGTGAACATCAGAAGGTATTTTTTAACTCCCAAGCAGTAGCAGGACGATGATAGGGCTGGAGGGCTATGGATTCCCAGCCCATCCCTGTGAAGGAGTAGGCCACTCTTTAAGTGAAGGATTGGATGATTGTTCATAATACATAAAGTTCTCTGTAATTACAACTAAATTATTATGCCCTCTTCTCACAGTCAAAAGGAACTGGGTGGTTTGGTTTTTGTTGCTTTTTTAGATTTATTGTCCCATGTGGGATGAGTTTTTAAATGCCACAAGACATAATTTAAAATAAATAAACTTTGGGAAAAGGTGTAAAACAGTAGCCCCATCACATTTGTGATACTGACAGGTATCAACCCAGAAGCCCATGAACTGTGTTTCCATCCTTTGCATTTCTCTGCGAGTAGTTCCACACAGGTTTGTAAGTAAGTAAGAAAGAAGGCAAATTGATTCAAATGTTACAAAAAAACCCTTCTTGGTGGATTAGACAGGTTAAATATATAAACAAACAAACAAAAATTGCTCAAAAAAGAGGAGAAAAGCTCAAGAGGAAAAGCTAAGGACTGGTAGGAAAAAGCTTTACTCTTTCATGCCATTTTATTTCTTTTTGATTTTTAAATCATTCATTCAATAGATACCACCGTGTGACCTATAATTTTGCAAATCTGTTACCTCTGACATCAAGTGTAATTAGCTTTTGGAGAGTGGGCTGACATCAAGTGTAATTAGCTTTTGGAGAGTGGGTTTTGTCCATTATTAATAATTAATTAATTAACATCAAACACGGCTTCTCATGCTATTTCTACCTCACTTTGGTTTTGGGGTGTTCCTGATAATTGTGCACACCTGAGTTCACAGCTTCACCACTTGTCCATTGCGTTATTTTCTTTTTCCTTTATAATTCTTTCTTTTTCCTTCATAATTTTCAAAAGAAAACCCAAAGCTCTAAGGTAACAAATTACCAAATTACATGAAGATTTGGTTTTTGTCTTGCATTTTTTTCCTTTATGTGACGCTGGACCTTTTCTTTACCCAAGGATTTTTAAAACTCAGATTTAAAACAAGGGGTTACTTTACATCCTACTAAGAAGTTTAAGTAAGTAAGTTTCATTCTAAAATCAGAGGTAAATAGAGTGCATAAATAATTTTGTTTTAATCTTTTTGTTTTTCTTTTAGACACATTAGCTCTGGAGTGAGTCTGTCATAATATTTGAACAAAAATTGAGAGCTTTATTGCTGCATTTTAAGCATAATTAATTTGGACATTATTTCGTGTTGTGTTCTTTATAACCACCAAGTATTAAACTGTAAATCATAATGTAACTGAAGCATAAACATCACATGGCATGTTTTGTCATTGTTTTCAGGTACTGAGTTCTTACTTGAGTATCATAATATATTGTGTTTTAACACCAACACTGTAACATTTACGAATTATTTTTTTAAACTTCAGTTTTACTGCATTTTCACAACATATCAGACTTCACCAAATATATGCCTTACTATTGTATTATAGTACTGCTTTACTGTGTATCTCAATAAAGCACGCAGTTATGTTAC

SEQ ID NO: 131 - protein, 176 aa, Homo sapiens
GAACTCCAGGATGGCATTGGGCAGCGGCAAACTGTTGTCAGAACATTGAATGCAACTGGGGAAGAAATAATTCAGCAATCCTCAAAAACAGATGCCAGTATTCTACAGGAAAAATTGGGAAGCCTGAATCTGCGGTGGCAGGAGGTCTGCAAACAGCTGTCAGACAGAAAAAAGAG

SEQ ID NO: 132 - protein, 446 aa, synthetic construct
  REGION 1..446: note = Synthetic
QVQLQQPGAELVKPGASVKLSCKASGYTFTSYWMHWVKQRPGQGLEWIGEINPTNGRTNYIEKFKSKATLTVDKSSSTAYMQLSSLTSEDSAVYYCARGTRAYHYWGQGTSVTVSSASTKGPSVFPLAPSSKSTSGGTAALGCLVKDYFPEPVTVSWNSGALTSGVHTFPAVLQSSGLYSLSSVVTVPSSSLGTQTYICNVNHKPSNTKVDKKVEPKSCDKTHTCPPCPAPELLGGPSVFLFPPKPKDTLMISRTPEVTCVVVDVSHEDPEVKFNWYVDGVEVHNAKTKPREEQYNSTYRVVSVLTVLHQDWLNGKEYKCKVSNKALPAPIEKTISKAKGQPREPQVYTLPPSRDELTKNQVSLTCLVKGFYPSDIAVEWESNGQPENNYKTTPPVLDSDGSFFLYSKLTVDKSRWQQGNVFSCSVMHEALHNHYTQKSLSLSPGK

SEQ ID NO: 133 - protein, 214 aa, synthetic construct
  REGION 1..214: note = Synthetic
DIQMTQSPASLSVSVGETVTITCRASDNLYSNLAWYQQKQGKSPQLLVYDATNLADGVPSRFSGSGSGTQYSLKINSLQSEDFGTYYCQHFWGTPLTFGAGTKLELKRTVAAPSVFIFPPSDEQLKSGTASVVCLLNNFYPREAKVQWKVDNALQSGNSQESVTEQDSKDSTYSLSSTLTLSKADYEKHKVYACEVTHQGLSSPVTKSFNRGEC

SEQ ID NO: 134 - protein, 446 aa, Homo sapiens
EVQLVQSGAEVKKPGASVKVSCKASGYTFTSYWMHWVRQAPGQRLEWIGEINPTNGRTNYIEKFKSRATLTVDKSASTAYMELSSLRSEDTAVYYCARGTRAYHYWGQGTMVTVSSASTKGPSVFPLAPSSKSTSGGTAALGCLVKDYFPEPVTVSWNSGALTSGVHTFPAVLQSSGLYSLSSVVTVPSSSLGTQTYICNVNHKPSNTKVDKKVEPKSCDKTHTCPPCPAPELLGGPSVFLFPPKPKDTLMISRTPEVTCVVVDVSHEDPEVKFNWYVDGVEVHNAKTKPREEQYNSTYRVVSVLTVLHQDWLNGKEYKCKVSNKALPAPIEKTISKAKGQPREPQVYTLPPSRDELTKNQVSLTCLVKGFYPSDIAVEWESNGQPENNYKTTPPVLDSDGSFFLYSKLTVDKSRWQQGNVFSCSVMHEALHNHYTQKSLSLSPGK

SEQ ID NO: 135 - protein, 214 aa, Homo sapiens
DIQMTQSPSSLSASVGDRVTITCRASDNLYSNLAWYQQKPGKSPKLLVYDATNLADGVPSRFSGSGSGTDYTLTISSLQPEDFATYYCQHFWGTPLTFGQGTKVEIKRTVAAPSVFIFPPSDEQLKSGTASVVCLLNNFYPREAKVQWKVDNALQSGNSQESVTEQDSKDSTYSLSSTLTLSKADYEKHKVYACEVTHQGLSSPVTKSFNRGEC

SEQ ID NO: 136 - protein, 226 aa, synthetic construct
  REGION 1..226: note = Synthetic
QVQLQQPGAELVKPGASVKLSCKASGYTFTSYWMHWVKQRPGQGLEWIGEINPTNGRTNYIEKFKSKATLTVDKSSSTAYMQLSSLTSEDSAVYYCARGTRAYHYWGQGTSVTVSSASTKGPSVFPLAPSSKSTSGGTAALGCLVKDYFPEPVTVSWNSGALTSGVHTFPAVLQSSGLYSLSSVVTVPSSSLGTQTYICNVNHKPSNTKVDKKVEPKSCDKTHTCP

SEQ ID NO: 137 - protein, 226 aa, Homo sapiens
EVQLVQSGAEVKKPGASVKVSCKASGYTFTSYWMHWVRQAPGQRLEWIGEINPTNGRTNYIEKFKSRATLTVDKSASTAYMELSSLRSEDTAVYYCARGTRAYHYWGQGTMVTVSSASTKGPSVFPLAPSSKSTSGGTAALGCLVKDYFPEPVTVSWNSGALTSGVHTFPAVLQSSGLYSLSSVVTVPSSSLGTQTYICNVNHKPSNTKVDKKVEPKSCDKTHTCP

SEQ ID NO: 138 - protein, 8 aa, synthetic construct
  REGION 1..8: note = Synthetic
GYSFTSYW

SEQ ID NO: 139 - protein, 8 aa, synthetic construct
  REGION 1..8: note = Synthetic
IYPGDSDT

SEQ ID NO: 140 - protein, 15 aa, synthetic construct
  REGION 1..15: note = Synthetic
ARFPYDSSGYYSFDY

SEQ ID NO: 141 - protein, 6 aa, synthetic construct
  REGION 1..6: note = Synthetic
QSISSY

SEQ ID NO: 142 - skipped

SEQ ID NO: 143 - protein, 9 aa, synthetic construct
  REGION 1..9: note = Synthetic
QQSYSTPLT

SEQ ID NO: 144 - protein, 5 aa, synthetic construct
  REGION 1..5: note = Synthetic
SYWIG

SEQ ID NO: 145 - protein, 18 aa, synthetic construct
  REGION 1..18: note = Synthetic
IIYPGDSDTRYSPSFQGQ

SEQ ID NO: 146 - protein, 13 aa, synthetic construct
  REGION 1..13: note = Synthetic
FPYDSSGYYSFDY

SEQ ID NO: 147 - protein, 11 aa, synthetic construct
  REGION 1..11: note = Synthetic
RASQSISSYLN

SEQ ID NO: 148 - protein, 7 aa, synthetic construct
  REGION 1..7: note = Synthetic
AASSLQS

SEQ ID NO: 149 - protein, 7 aa, synthetic construct
  REGION 1..7: note = Synthetic
GYSFTSY

SEQ ID NO: 150 - skipped

SEQ ID NO: 151 - protein, 11 aa, synthetic construct
  REGION 1..11: note = Synthetic
PYDSSGYYSFD

SEQ ID NO: 152 - protein, 7 aa, synthetic construct
  REGION 1..7: note = Synthetic
SQSISSY

SEQ ID NO: 153 - protein, 6 aa, synthetic construct
  REGION 1..6: note = Synthetic
SYSTPL

SEQ ID NO: 154 - protein, 122 aa, synthetic construct
  REGION 1..122: note = Synthetic
QVQLVQSGAEVKKPGESLKISCKGSGYSFTSYWIGWVRQMPGKGLEWMGIIYPGDSDTRYSPSFQGQVTISADKSISTAYLQWSSLKASDTAMYYCARFPYDSSGYYSFDYWGQGTLVTVSS

SEQ ID NO: 155 - protein, 107 aa, synthetic construct [sequence omitted]

SEQ ID NO: 156 - protein, 452 aa, synthetic construct
  REGION 1..452: note = Synthetic
QVQLVQSGAEVKKPGESLKISCKGSGYSFTSYWIGWVRQMPGKGLEWMGIIYPGDSDTRYSPSFQGQVTISADKSISTAYLQWSSLKASDTAMYYCARFPYDSSGYYSFDYWGQGTLVTVSSASTKGPSVFPLAPSSKSTSGGTAALGCLVKDYFPEPVTVSWNSGALTSGVHTFPAVLQSSGLYSLSSVVTVPSSSLGTQTYICNVNHKPSNTKVDKKVEPKSCDKTHTCPPCPAPELLGGPSVFLFPPKPKDTLMISRTPEVTCVVVDVSHEDPEVKFNWYVDGVEVHNAKTKPREEQYNSTYRVVSVLTVLHQDWLNGKEYKCKVSNKALPAPIEKTISKAKGQPREPQVYTLPPSRDELTKNQVSLTCLVKGFYPSDIAVEWESNGQPENNYKTTPPVLDSDGSFFLYSKLTVDKSRWQQGNVFSCSVMHEALHNHYTQKSLSLSPGK

SEQ ID NO: 157 - protein, 214 aa, synthetic construct
  REGION 1..214: note = Synthetic
DIQMTQSPSSLSASVGDRVTITCRASQSISSYLNWYQQKPGKAPKLLIYAASSLQSGVPSRFSGSGSGTDFTLTISSLQPEDFATYYCQQSYSTPLTFGGGTKVEIKRTVAAPSVFIFPPSDEQLKSGTASVVCLLNNFYPREAKVQWKVDNALQSGNSQESVTEQDSKDSTYSLSSTLTLSKADYEKHKVYACEVTHQGLSSPVTKSFNRGEC

SEQ ID NO: 158 - protein, 232 aa, synthetic construct
  REGION 1..232: note = Synthetic
QVQLVQSGAEVKKPGESLKISCKGSGYSFTSYWIGWVRQMPGKGLEWMGIIYPGDSDTRYSPSFQGQVTISADKSISTAYLQWSSLKASDTAMYYCARFPYDSSGYYSFDYWGQGTLVTVSSASTKGPSVFPLAPSSKSTSGGTAALGCLVKDYFPEPVTVSWNSGALTSGVHTFPAVLQSSGLYSLSSVVTVPSSSLGTQTYICNVNHKPSNTKVDKKVEPKSCDKTHTCP

SEQ ID NO: 159 - protein, 230 aa, synthetic construct
  REGION 1..230: note = Synthetic
QVQLVQSGAEVKKPGESLKISCKGSGYSFTSYWIGWVRQMPGKGLEWMGIIYPGDSDTRYSPSFQGQVTISADKSISTAYLQWSSLKASDTAMYYCARFPYDSSGYYSFDYWGQGTLVTVSSASTKGPSVFPLAPSSKSTSGGTAALGCLVKDYFPEPVTVSWNSGALTSGVHTFPAVLQSSGLYSLSSVVTVPSSSLGTQTYICNVNHKPSNTKVDKKVEPKSCDKTHT

SEQ ID NO: 160 - RNA, 25 nt, synthetic construct
  misc_feature 1..25: note = Synthetic
  source 1..25: mol_type = other RNA
ctttgccagtacaactgcatgtggt

SEQ ID NO: 161 - RNA, 24 nt, synthetic construct
  misc_feature 1..24: note = Synthetic
  source 1..24: mol_type = other RNA
ttgccagtacaactgcatgtggta

SEQ ID NO: 162 - RNA, 25 nt, synthetic construct
  misc_feature 1..25: note = Synthetic
  source 1..25: mol_type = other RNA
ttgccagtacaactgcatgtggtag

SEQ ID NO: 163 - RNA, 22 nt, synthetic construct
  misc_feature 1..22: note = Synthetic
  source 1..22: mol_type = other RNA
tgccagtacaactgcatgtggt

SEQ ID NO: 164 - RNA, 23 nt, synthetic construct
  misc_feature 1..23: note = Synthetic
  source 1..23: mol_type = other RNA
tgccagtacaactgcatgtggta

SEQ ID NO: 165 - RNA, 24 nt, synthetic construct
  misc_feature 1..24: note = Synthetic
  source 1..24: mol_type = other RNA
tgccagtacaactgcatgtggtag

SEQ ID NO: 166 - RNA, 25 nt, synthetic construct
  misc_feature 1..25: note = Synthetic
  source 1..25: mol_type = other RNA
tgccagtacaactgcatgtggtagc

SEQ ID NO: 167 - RNA, 21 nt, synthetic construct
  misc_feature 1..21: note = Synthetic
  source 1..21: mol_type = other RNA
gccagtacaactgcatgtggt

SEQ ID NO: 168 - RNA, 22 nt, synthetic construct
  misc_feature 1..22: note = Synthetic
  source 1..22: mol_type = other RNA
gccagtacaactgcatgtggta

SEQ ID NO: 169 - RNA, 23 nt, synthetic construct
  misc_feature 1..23: note = Synthetic
  source 1..23: mol_type = other RNA
gccagtacaactgcatgtggtag

SEQ ID NO: 170 - RNA, 24 nt, synthetic construct
  misc_feature 1..24: note = Synthetic
  source 1..24: mol_type = other RNA
gccagtacaactgcatgtggtagc

SEQ ID NO: 171 - RNA, 25 nt, synthetic construct
  misc_feature 1..25: note = Synthetic
  source 1..25: mol_type = other RNA
gccagtacaactgcatgtggtagca

SEQ ID NO: 172 - RNA, 22 nt, synthetic construct
  misc_feature 1..22: note = Synthetic
  source 1..22: mol_type = other RNA
ccagtacaactgcatgtggtag

SEQ ID NO: 173 - RNA, 23 nt, synthetic construct
  misc_feature 1..23: note = Synthetic
  source 1..23: mol_type = other RNA
ccagtacaactgcatgtggtagc

SEQ ID NO: 174 - RNA, 24 nt, synthetic construct
  misc_feature 1..24: note = Synthetic
  source 1..24: mol_type = other RNA
ccagtacaactgcatgtggtagca

SEQ ID NO: 175 - RNA, 22 nt, synthetic construct
  misc_feature 1..22: note = Synthetic
  source 1..22: mol_type = other RNA
cagtacaactgcatgtggtagc

SEQ ID NO: 176 - RNA, 23 nt, synthetic construct
  misc_feature 1..23: note = Synthetic
  source 1..23: mol_type = other RNA
cagtacaactgcatgtggtagca

SEQ ID NO: 177 - RNA, 21 nt, synthetic construct
  misc_feature 1..21: note = Synthetic
  source 1..21: mol_type = other RNA
agtacaactgcatgtggtagc

SEQ ID NO: 178 - RNA, 22 nt, synthetic construct
  misc_feature 1..22: note = Synthetic
  source 1..22: mol_type = other RNA
agtacaactgcatgtggtagca

SEQ ID NO: 179 - RNA, 22 nt, synthetic construct
  misc_feature 1..22: note = Synthetic
  source 1..22: mol_type = other RNA
gtacaactgcatgtggtagcac

SEQ ID NO: 180 - RNA, 23 nt, synthetic construct
  misc_feature 1..23: note = Synthetic
  source 1..23: mol_type = other RNA
gtacaactgcatgtggtagcaca

SEQ ID NO: 181 - RNA, 21 nt, synthetic construct
  misc_feature 1..21: note = Synthetic
  source 1..21: mol_type = other RNA
ataaaaagacatggggcttca

SEQ ID NO: 182 - RNA, 23 nt, synthetic construct
  misc_feature 1..23: note = Synthetic
  source 1..23: mol_type = other RNA
tcttacaggaactccaggatggc

SEQ ID NO: 183 - RNA, 24 nt, synthetic construct
  misc_feature 1..24: note = Synthetic
  source 1..24: mol_type = other RNA
tcttacaggaactccaggatggca

SEQ ID NO: 184 - RNA, 25 nt, synthetic construct
  misc_feature 1..25: note = Synthetic
  source 1..25: mol_type = other RNA
tcttacaggaactccaggatggcat

SEQ ID NO: 185 - RNA, 23 nt, synthetic construct
  misc_feature 1..23: note = Synthetic
  source 1..23: mol_type = other RNA
cttacaggaactccaggatggca

SEQ ID NO: 186 - RNA, 24 nt, synthetic construct
  misc_feature 1..24: note = Synthetic
  source 1..24: mol_type = other RNA
cttacaggaactccaggatggcat

SEQ ID NO: 187 - RNA, 25 nt, synthetic construct
  misc_feature 1..25: note = Synthetic
  source 1..25: mol_type = other RNA
cttacaggaactccaggatggcatt

SEQ ID NO: 188 - RNA, 20 nt, synthetic construct
  misc_feature 1..20: note = Synthetic
  source 1..20: mol_type = other RNA
tacaggaactccaggatggc

SEQ ID NO: 189 - RNA, 21 nt, synthetic construct
  misc_feature 1..21: note = Synthetic
  source 1..21: mol_type = other RNA
tacaggaactccaggatggca

SEQ ID NO: 190 - RNA, 22 nt, synthetic construct
  misc_feature 1..22: note = Synthetic
  source 1..22: mol_type = other RNA
tacaggaactccaggatggcat

SEQ ID NO: 191 - RNA, 23 nt, synthetic construct
  misc_feature 1..23: note = Synthetic
  source 1..23: mol_type = other RNA
tacaggaactccaggatggcatt

SEQ ID NO: 192 - RNA, 25 nt, synthetic construct
  misc_feature 1..25: note = Synthetic
  source 1..25: mol_type = other RNA
tacaggaactccaggatggcattgg

SEQ ID NO: 193 - RNA, 20 nt, synthetic construct
  misc_feature 1..20: note = Synthetic
  source 1..20: mol_type = other RNA
acaggaactccaggatggca

SEQ ID NO: 194 - RNA, 21 nt, synthetic construct
  misc_feature 1..21: note = Synthetic
  source 1..21: mol_type = other RNA
acaggaactccaggatggcat

SEQ ID NO: 195 - RNA, 22 nt, synthetic construct
  misc_feature 1..22: note = Synthetic
  source 1..22: mol_type = other RNA
acaggaactccaggatggcatt

SEQ ID NO: 196 - RNA, 24 nt, synthetic construct
  misc_feature 1..24: note = Synthetic
  source 1..24: mol_type = other RNA
acaggaactccaggatggcattgg

SEQ ID NO: 197 - RNA, 25 nt, synthetic construct
  misc_feature 1..25: note = Synthetic
  source 1..25: mol_type = other RNA
acaggaactccaggatggcattggg

SEQ ID NO: 198 - RNA, 20 nt, synthetic construct
  misc_feature 1..20: note = Synthetic
  source 1..20: mol_type = other RNA
caggaactccaggatggcat

SEQ ID NO: 199 - RNA, 21 nt, synthetic construct
  misc_feature 1..21: note = Synthetic
  source 1..21: mol_type = other RNA
caggaactccaggatggcatt

SEQ ID NO: 200 - RNA, 23 nt, synthetic construct
  misc_feature 1..23: note = Synthetic
  source 1..23: mol_type = other RNA
caggaactccaggatggcattgg

SEQ ID NO: 201 - RNA, 24 nt, synthetic construct
  misc_feature 1..24: note = Synthetic
  source 1..24: mol_type = other RNA
caggaactccaggatggcattggg

SEQ ID NO: 202 - RNA, 25 nt, synthetic construct
  misc_feature 1..25: note = Synthetic
  source 1..25: mol_type = other RNA
caggaactccaggatggcattgggc

SEQ ID NO: 203 - RNA, 20 nt, synthetic construct
  misc_feature 1..20: note = Synthetic
  source 1..20: mol_type = other RNA
aggaactccaggatggcatt

SEQ ID NO: 204 - RNA, 22 nt, synthetic construct
  misc_feature 1..22: note = Synthetic
  source 1..22: mol_type = other RNA
aggaactccaggatggcattgg

SEQ ID NO: 205 - RNA, 23 nt, synthetic construct
  misc_feature 1..23: note = Synthetic
  source 1..23: mol_type = other RNA
aggaactccaggatggcattggg

SEQ ID NO: 206 - RNA, 24 nt, synthetic construct
  misc_feature 1..24: note = Synthetic
  source 1..24: mol_type = other RNA
aggaactccaggatggcattgggc

SEQ ID NO: 207 - RNA, 25 nt, synthetic construct
  misc_feature 1..25: note = Synthetic
  source 1..25: mol_type = other RNA
aggaactccaggatggcattgggca

SEQ ID NO: 208 - RNA, 21 nt, synthetic construct
  misc_feature 1..21: note = Synthetic
  source 1..21: mol_type = other RNA
ggaactccaggatggcattgg

SEQ ID NO: 209 - RNA, 22 nt, synthetic construct
  misc_feature 1..22: note = Synthetic
  source 1..22: mol_type = other RNA
ggaactccaggatggcattggg

SEQ ID NO: 210 - RNA, 24 nt, synthetic construct
  misc_feature 1..24: note = Synthetic
  source 1..24: mol_type = other RNA
ggaactccaggatggcattgggca

SEQ ID NO: 211 - RNA, 25 nt, synthetic construct
  misc_feature 1..25: note = Synthetic
  source 1..25: mol_type = other RNA
ggaactccaggatggcattgggcag

SEQ ID NO: 212 - RNA, 20 nt, synthetic construct
  misc_feature 1..20: note = Synthetic
  source 1..20: mol_type = other RNA
gaactccaggatggcattgg

SEQ ID NO: 213 - RNA, 21 nt, synthetic construct
  misc_feature 1..21: note = Synthetic
  source 1..21: mol_type = other RNA
gaactccaggatggcattggg

SEQ ID NO: 214 - RNA, 22 nt, synthetic construct
  misc_feature 1..22: note = Synthetic
  source 1..22: mol_type = other RNA
gaactccaggatggcattgggc

SEQ ID NO: 215 - RNA, 23 nt, synthetic construct
  misc_feature 1..23: note = Synthetic
  source 1..23: mol_type = other RNA
gaactccaggatggcattgggca

SEQ ID NO: 216 - RNA, 24 nt, synthetic construct
  misc_feature 1..24: note = Synthetic
  source 1..24: mol_type = other RNA
gaactccaggatggcattgggcag

SEQ ID NO: 217 - RNA, 25 nt, synthetic construct
  misc_feature 1..25: note = Synthetic
  source 1..25: mol_type = other RNA
gaactccaggatggcattgggcagc

SEQ ID NO: 218 - RNA, 20 nt, synthetic construct
  misc_feature 1..20: note = Synthetic
  source 1..20: mol_type = other RNA
aactccaggatggcattggg

SEQ ID NO: 219 - RNA, 21 nt, synthetic construct
  misc_feature 1..21: note = Synthetic
  source 1..21: mol_type = other RNA
aactccaggatggcattgggc

SEQ ID NO: 220 - RNA, 22 nt, synthetic construct
  misc_feature 1..22: note = Synthetic
  source 1..22: mol_type = other RNA
aactccaggatggcattgggca

SEQ ID NO: 221 - RNA, 23 nt, synthetic construct
  misc_feature 1..23: note = Synthetic
  source 1..23: mol_type = other RNA
aactccaggatggcattgggcag

SEQ ID NO: 222 - RNA, 24 nt, synthetic construct
  misc_feature 1..24: note = Synthetic
  source 1..24: mol_type = other RNA
aactccaggatggcattgggcagc

SEQ ID NO: 223 - RNA, 20 nt, synthetic construct
  misc_feature 1..20: note = Synthetic
  source 1..20: mol_type = other RNA
actccaggatggcattgggc

SEQ ID NO: 224 - RNA, 21 nt, synthetic construct
  misc_feature 1..21: note = Synthetic
  source 1..21: mol_type = other RNA
actccaggatggcattgggca

SEQ ID NO: 225 - RNA, 22 nt, synthetic construct
  misc_feature 1..22: note = Synthetic
  source 1..22: mol_type = other RNA
actccaggatggcattgggcag

SEQ ID NO: 226 - RNA, 20 nt, synthetic construct
  misc_feature 1..20: note = Synthetic
  source 1..20: mol_type = other RNA
ctccaggatggcattgggca

SEQ ID NO: 227 - RNA, 24 nt, synthetic construct
  misc_feature 1..24: note = Synthetic
  source 1..24: mol_type = other RNA
cagaacattgaatgcaactgggga

SEQ ID NO: 228 - RNA, 23 nt, synthetic construct
  misc_feature 1..23: note = Synthetic
  source 1..23: mol_type = other RNA
agaacattgaatgcaactgggga

SEQ ID NO: 229 - RNA, 25 nt, synthetic construct
  misc_feature 1..25: note = Synthetic
  source 1..25: mol_type = other RNA
agaacattgaatgcaactggggaag

SEQ ID NO: 230 - RNA, 25 nt, synthetic construct
  misc_feature 1..25: note = Synthetic
  source 1..25: mol_type = other RNA
gaacattgaatgcaactggggaaga

SEQ ID NO: 231 - RNA, 25 nt, synthetic construct
  misc_feature 1..25: note = Synthetic
  source 1..25: mol_type = other RNA
cattgaatgcaactggggaagaaat

SEQ ID NO: 232 - RNA, 24 nt, synthetic construct
  misc_feature 1..24: note = Synthetic
  source 1..24: mol_type = other RNA
attgaatgcaactggggaagaaat

SEQ ID NO: 233 - RNA, 25 nt, synthetic construct
  misc_feature 1..25: note = Synthetic
  source 1..25: mol_type = other RNA
attgaatgcaactggggaagaaata

SEQ ID NO: 234 - RNA, 23 nt, synthetic construct
  misc_feature 1..23: note = Synthetic
  source 1..23: mol_type = other RNA
ttgaatgcaactggggaagaaat

SEQ ID NO: 235 - RNA, 24 nt, synthetic construct
  misc_feature 1..24: note = Synthetic
  source 1..24: mol_type = other RNA
ttgaatgcaactggggaagaaata

SEQ ID NO: 236 - RNA, 25 nt, synthetic construct
  misc_feature 1..25: note = Synthetic
  source 1..25: mol_type = other RNA
ttgaatgcaactggggaagaaataa

SEQ ID NO: 237 - RNA, 20 nt, synthetic construct
  misc_feature 1..20: note = Synthetic
  source 1..20: mol_type = other RNA
tgaatgcaactggggaagaa

SEQ ID NO: 238 - RNA, 22 nt, synthetic construct
  misc_feature 1..22: note = Synthetic
  source 1..22: mol_type = other RNA
tgaatgcaactggggaagaaat

SEQ ID NO: 239 - RNA, 23 nt, synthetic construct
  misc_feature 1..23: note = Synthetic
  source 1..23: mol_type = other RNA
tgaatgcaactggggaagaaata

SEQ ID NO: 240 - RNA, 24 nt, synthetic construct
  misc_feature 1..24: note = Synthetic
  source 1..24: mol_type = other RNA
tgaatgcaactggggaagaaataa

SEQ ID NO: 241 - RNA, 21 nt, synthetic construct
  misc_feature 1..21: note = Synthetic
  source 1..21: mol_type = other RNA
gaatgcaactggggaagaaat

SEQ ID NO: 242 - RNA, 22 nt, synthetic construct
  misc_feature 1..22: note = Synthetic
  source 1..22: mol_type = other RNA
gaatgcaactggggaagaaata

SEQ ID NO: 243 - RNA, 23 nt, synthetic construct
  misc_feature 1..23: note = Synthetic
  source 1..23: mol_type = other RNA
gaatgcaactggggaagaaataa

SEQ ID NO: 244 - RNA, 21 nt, synthetic construct
  misc_feature 1..21: note = Synthetic
  source 1..21: mol_type = other RNA
aatgcaactggggaagaaata

SEQ ID NO: 245 - RNA, 20 nt, synthetic construct
  misc_feature 1..20: note = Synthetic
  source 1..20: mol_type = other RNA
atgcaactggggaagaaata

SEQ ID NO: 246 - RNA, 21 nt, synthetic construct
  misc_feature 1..21: note = Synthetic
  source 1..21: mol_type = other RNA
atgcaactggggaagaaataa

SEQ ID NO: 247 - RNA, 22 nt, synthetic construct
  misc_feature 1..22: note = Synthetic
  source 1..22: mol_type = other RNA
atgcaactggggaagaaataat

SEQ ID NO: 248 - RNA, 24 nt, synthetic construct
  misc_feature 1..24: note = Synthetic
  source 1..24: mol_type = other RNA
aattcagcaatcctcaaaaacaga

SEQ ID NO: 249 - RNA, 25 nt, synthetic construct
  misc_feature 1..25: note = Synthetic
  source 1..25: mol_type = other RNA
aattcagcaatcctcaaaaacagat

SEQ ID NO: 250 - RNA, 22 nt, synthetic construct
  misc_feature 1..22: note = Synthetic
  source 1..22: mol_type = other RNA
attcagcaatcctcaaaaacag

SEQ ID NO: 251 - RNA, 23 nt, synthetic construct
  misc_feature 1..23: note = Synthetic
  source 1..23: mol_type = other RNA
attcagcaatcctcaaaaacaga

SEQ ID NO: 252 - RNA, 24 nt, synthetic construct
  misc_feature 1..24: note = Synthetic
  source 1..24: mol_type = other RNA
attcagcaatcctcaaaaacagat

SEQ ID NO: 253 - RNA, 25 nt, synthetic construct
  misc_feature 1..25: note = Synthetic
  source 1..25: mol_type = other RNA
attcagcaatcctcaaaaacagatg

SEQ ID NO: 254 - RNA, 22 nt, synthetic construct
  misc_feature 1..22: note = Synthetic
  source 1..22: mol_type = other RNA
ttcagcaatcctcaaaaacaga

SEQ ID NO: 255 - RNA, 23 nt, synthetic construct
  misc_feature 1..23: note = Synthetic
  source 1..23: mol_type = other RNA
ttcagcaatcctcaaaaacagat

SEQ ID NO: 256 - RNA, 24 nt, synthetic construct
  misc_feature 1..24: note = Synthetic
  source 1..24: mol_type = other RNA
ttcagcaatcctcaaaaacagatg

SEQ ID NO: 257 - RNA, 20 nt, synthetic construct
  misc_feature 1..20: note = Synthetic
  source 1..20: mol_type = other RNA
tcagcaatcctcaaaaacag

SEQ ID NO: 258 - RNA, 21 nt, synthetic construct
  misc_feature 1..21: note = Synthetic
  source 1..21: mol_type = other RNA
tcagcaatcctcaaaaacaga

SEQ ID NO: 259 - RNA, 22 nt, synthetic construct
  misc_feature 1..22: note = Synthetic
  source 1..22: mol_type = other RNA
tcagcaatcctcaaaaacagat

SEQ ID NO: 260 - RNA, 23 nt, synthetic construct
  misc_feature 1..23: note = Synthetic
  source 1..23: mol_type = other RNA
tcagcaatcctcaaaaacagatg

SEQ ID NO: 261 - RNA, 20 nt, synthetic construct
  misc_feature 1..20: note = Synthetic
  source 1..20: mol_type = other RNA
cagcaatcctcaaaaacaga

SEQ ID NO: 262 - RNA, 21 nt, synthetic construct
  misc_feature 1..21: note = Synthetic
  source 1..21: mol_type = other RNA
cagcaatcctcaaaaacagat

SEQ ID NO: 263 - RNA, 22 nt, synthetic construct
  misc_feature 1..22: note = Synthetic
  source 1..22: mol_type = other RNA
cagcaatcctcaaaaacagatg

SEQ ID NO: 264 - RNA, 20 nt, synthetic construct
  misc_feature 1..20: note = Synthetic
  source 1..20: mol_type = other RNA
agcaatcctcaaaaacagat

SEQ ID NO: 265 - RNA, 21 nt, synthetic construct
  misc_feature 1..21: note = Synthetic
  source 1..21: mol_type = other RNA
agcaatcctcaaaaacagatg

SEQ ID NO: 266 - RNA, 21 nt, synthetic construct
  misc_feature 1..21: note = Synthetic
  source 1..21: mol_type = other RNA
gcaatcctcaaaaacagatgc

SEQ ID NO: 267 - RNA, 22 nt, synthetic construct
  misc_feature 1..22: note = Synthetic
  source 1..22: mol_type = other RNA
gcaatcctcaaaaacagatgcc

SEQ ID NO: 268 - RNA, 23 nt, synthetic construct
  misc_feature 1..23: note = Synthetic
  source 1..23: mol_type = other RNA
gcaatcctcaaaaacagatgcca

SEQ ID NO: 269 - RNA, 21 nt, synthetic construct
  misc_feature 1..21: note = Synthetic
  source 1..21: mol_type = other RNA
caatcctcaaaaacagatgcc

SEQ ID NO: 270 - RNA, 22 nt, synthetic construct
  misc_feature 1..22: note = Synthetic
  source 1..22: mol_type = other RNA
caatcctcaaaaacagatgcca

SEQ ID NO: 271 - RNA, 25 nt, synthetic construct
  misc_feature 1..25: note = Synthetic
  source 1..25: mol_type = other RNA
caatcctcaaaaacagatgccagta

SEQ ID NO: 272 - RNA, 20 nt, synthetic construct
  misc_feature 1..20: note = Synthetic
  source 1..20: mol_type = other RNA
aatcctcaaaaacagatgcc

SEQ ID NO: 273 - RNA, 21 nt, synthetic construct
  misc_feature 1..21: note = Synthetic
  source 1..21: mol_type = other RNA
aatcctcaaaaacagatgcca

SEQ ID NO: 274 - RNA, 24 nt, synthetic construct
  misc_feature 1..24: note = Synthetic
  source 1..24: mol_type = other RNA
aatcctcaaaaacagatgccagta

SEQ ID NO: 275 - RNA, 25 nt, synthetic construct
  misc_feature 1..25: note = Synthetic
  source 1..25: mol_type = other RNA
aatcctcaaaaacagatgccagtat

SEQ ID NO: 276 - RNA, 20 nt, synthetic construct
  misc_feature 1..20: note = Synthetic
  source 1..20: mol_type = other RNA
atcctcaaaaacagatgcca

SEQ ID NO: 277 - RNA, 23 nt, synthetic construct
  misc_feature 1..23: note = Synthetic
  source 1..23: mol_type = other RNA
atcctcaaaaacagatgccagta

SEQ ID NO: 278 - RNA, 24 nt, synthetic construct
  misc_feature 1..24: note = Synthetic
  source 1..24: mol_type = other RNA
atcctcaaaaacagatgccagtat

SEQ ID NO: 279 - RNA, 25 nt, synthetic construct
  misc_feature 1..25: note = Synthetic
  source 1..25: mol_type = other RNA
atcctcaaaaacagatgccagtatt

SEQ ID NO: 280 - RNA, 22 nt, synthetic construct
  misc_feature 1..22: note = Synthetic
  source 1..22: mol_type = other RNA
tcctcaaaaacagatgccagta

SEQ ID NO: 281 - RNA, 23 nt, synthetic construct
  misc_feature 1..23: note = Synthetic
  source 1..23: mol_type = other RNA
tcctcaaaaacagatgccagtat

SEQ ID NO: 282 - RNA, 24 nt, synthetic construct
  misc_feature 1..24: note = Synthetic
  source 1..24: mol_type = other RNA
tcctcaaaaacagatgccagtatt

SEQ ID NO: 283 - RNA, 21 nt, synthetic construct
  misc_feature 1..21: note = Synthetic
  source 1..21: mol_type = other RNA
cctcaaaaacagatgccagta

SEQ ID NO: 284 - RNA, 22 nt, synthetic construct
  misc_feature 1..22: note = Synthetic
  source 1..22: mol_type = other RNA
cctcaaaaacagatgccagtat

SEQ ID NO: 285 - RNA, 23 nt, synthetic construct
  misc_feature 1..23: note = Synthetic
  source 1..23: mol_type = other RNA
cctcaaaaacagatgccagtatt

SEQ ID NO: 286 - RNA, 25 nt, synthetic construct
  misc_feature 1..25: note = Synthetic
  source 1..25: mol_type = other RNA
cctcaaaaacagatgccagtattct

SEQ ID NO: 287 - RNA, 20 nt, synthetic construct
  misc_feature 1..20: note = Synthetic
  source 1..20: mol_type = other RNA
ctcaaaaacagatgccagta

SEQ ID NO: 288 - RNA, 21 nt, synthetic construct
  misc_feature 1..21: note = Synthetic
  source 1..21: mol_type = other RNA
ctcaaaaacagatgccagtat

SEQ ID NO: 289 - RNA, 22 nt, synthetic construct
  misc_feature 1..22: note = Synthetic
  source 1..22: mol_type = other RNA
ctcaaaaacagatgccagtatt

SEQ ID NO: 290 - RNA, 24 nt, synthetic construct
  misc_feature 1..24: note = Synthetic
  source 1..24: mol_type = other RNA
ctcaaaaacagatgccagtattct

SEQ ID NO: 291 - RNA, 25 nt, synthetic construct
  misc_feature 1..25: note = Synthetic
  source 1..25: mol_type = other RNA
ctcaaaaacagatgccagtattcta

SEQ ID NO: 292 - RNA, 20 nt, synthetic construct
  misc_feature 1..20: note = Synthetic
  source 1..20: mol_type = other RNA
tcaaaaacagatgccagtat

SEQ ID NO: 293 - RNA, 21 nt, synthetic construct
  misc_feature 1..21: note = Synthetic
  source 1..21: mol_type = other RNA
tcaaaaacagatgccagtatt

SEQ ID NO: 294 - RNA, 23 nt, synthetic construct
  misc_feature 1..23: note = Synthetic
  source 1..23: mol_type = other RNA
tcaaaaacagatgccagtattct

SEQ ID NO: 295 - RNA, 24 nt, synthetic construct
  misc_feature 1..24: note = Synthetic
  source 1..24: mol_type = other RNA
tcaaaaacagatgccagtattcta

SEQ ID NO: 296 - RNA, 25 nt, synthetic construct
  misc_feature 1..25: note = Synthetic
  source 1..25: mol_type = other RNA
tcaaaaacagatgccagtattctac

SEQ ID NO: 297 - RNA, 22 nt, synthetic construct
  misc_feature 1..22: note = Synthetic
  source 1..22: mol_type = other RNA
caaaaacagatgccagtattct

SEQ ID NO: 298 - RNA, 23 nt, synthetic construct
  misc_feature 1..23: note = Synthetic
  source 1..23: mol_type = other RNA
caaaaacagatgccagtattcta

SEQ ID NO: 299 - RNA, 24 nt, synthetic construct
  misc_feature 1..24: note = Synthetic
  source 1..24: mol_type = other RNA
caaaaacagatgccagtattctac

SEQ ID NO: 300 - RNA, 25 nt, synthetic construct
  misc_feature 1..25: note = Synthetic
  source 1..25: mol_type = other RNA
caaaaacagatgccagtattctaca

SEQ ID NO: 301 - RNA, 23 nt, synthetic construct
  misc_feature 1..23: note = Synthetic
  source 1..23: mol_type = other RNA
aaaaacagatgccagtattctac

SEQ ID NO: 302 - RNA, 24 nt, synthetic construct
  misc_feature 1..24: note = Synthetic
  source 1..24: mol_type = other RNA
aaaaacagatgccagtattctaca

SEQ ID NO: 303 - RNA, 25 nt, synthetic construct
  misc_feature 1..25: note = Synthetic
  source 1..25: mol_type = other RNA
aaaaacagatgccagtattctacag

SEQ ID NO: 304 - RNA, 22 nt, synthetic construct
  misc_feature 1..22: note = Synthetic
  source 1..22: mol_type = other RNA
aaaacagatgccagtattctac

SEQ ID NO: 305 - RNA, 23 nt, synthetic construct
  misc_feature 1..23: note = Synthetic
  source 1..23: mol_type = other RNA
aaaacagatgccagtattctaca

SEQ ID NO: 306 - RNA, 24 nt, synthetic construct
  misc_feature 1..24: note = Synthetic
  source 1..24: mol_type = other RNA
aaaacagatgccagtattctacag

SEQ ID NO: 307 - RNA, 25 nt, synthetic construct
  misc_feature 1..25: note = Synthetic
  source 1..25: mol_type = other RNA
aaaacagatgccagtattctacagg

SEQ ID NO: 308 - RNA, 21 nt, synthetic construct
  misc_feature 1..21: note = Synthetic
  source 1..21: mol_type = other RNA
aaacagatgccagtattctac

SEQ ID NO: 309 - RNA, 22 nt, synthetic construct
  misc_feature 1..22: note = Synthetic
  source 1..22: mol_type = other RNA
aaacagatgccagtattctaca

SEQ ID NO: 310 - RNA, 23 nt, synthetic construct
  misc_feature 1..23: note = Synthetic
  source 1..23: mol_type = other RNA
aaacagatgccagtattctacag

SEQ ID NO: 311 - RNA, 24 nt, synthetic construct
  misc_feature 1..24: note = Synthetic
  source 1..24: mol_type = other RNA
aaacagatgccagtattctacagg

SEQ ID NO: 312 - RNA, 25 nt, synthetic construct
  misc_feature 1..25: note = Synthetic
  source 1..25: mol_type = other RNA
aaacagatgccagtattctacagga

SEQ ID NO: 313 - RNA, 20 nt, synthetic construct
  misc_feature 1..20: note = Synthetic
  source 1..20: mol_type = other RNA
aacagatgccagtattctac

SEQ ID NO: 314 - RNA, 21 nt, synthetic construct
  misc_feature 1..21: note = Synthetic
  source 1..21: mol_type = other RNA
aacagatgccagtattctaca

SEQ ID NO: 315 - RNA, 22 nt, synthetic construct
  misc_feature 1..22: note = Synthetic
  source 1..22: mol_type = other RNA
aacagatgccagtattctacag

SEQ ID NO: 316 - RNA, 23 nt, synthetic construct
  misc_feature 1..23: note = Synthetic
  source 1..23: mol_type = other RNA
aacagatgccagtattctacagg

SEQ ID NO: 317 - RNA, 24 nt, synthetic construct
  misc_feature 1..24: note = Synthetic
  source 1..24: mol_type = other RNA
aacagatgccagtattctacagga

SEQ ID NO: 318 - RNA, 25 nt, synthetic construct
  misc_feature 1..25: note = Synthetic
  source 1..25: mol_type = other RNA
aacagatgccagtattctacaggaa

SEQ ID NO: 319 - RNA, 20 nt, synthetic construct
  misc_feature 1..20: note = Synthetic
  source 1..20: mol_type = other RNA
acagatgccagtattctaca

SEQ ID NO: 320 - RNA, 21 nt, synthetic construct
  misc_feature 1..21: note = Synthetic
  source 1..21: mol_type = other RNA
acagatgccagtattctacag

SEQ ID NO: 321 - RNA, 22 nt, synthetic construct
  misc_feature 1..22: note = Synthetic
  source 1..22: mol_type = other RNA
acagatgccagtattctacagg

SEQ ID NO: 322 - RNA, 23 nt, synthetic construct
  misc_feature 1..23: note = Synthetic
  source 1..23: mol_type = other RNA
acagatgccagtattctacagga

SEQ ID NO: 323 - RNA, 24 nt, synthetic construct
  misc_feature 1..24: note = Synthetic
  source 1..24: mol_type = other RNA
acagatgccagtattctacaggaa

SEQ ID NO: 324 - RNA, 22 nt, synthetic construct
  misc_feature 1..22: note = Synthetic
  source 1..22: mol_type = other RNA
cagatgccagtattctacagga

SEQ ID NO: 325 - RNA, 23 nt, synthetic construct
  misc_feature 1..23: note = Synthetic
  source 1..23: mol_type = other RNA
cagatgccagtattctacaggaa

SEQ ID NO: 326 - RNA, 25 nt, synthetic construct
  misc_feature 1..25: note = Synthetic
  source 1..25: mol_type = other RNA
cagatgccagtattctacaggaaaa

SEQ ID NO: 327 - RNA, 22 nt, synthetic construct
  misc_feature 1..22: note = Synthetic
  source 1..22: mol_type = other RNA
agatgccagtattctacaggaa

SEQ ID NO: 328 - RNA, 24 nt, synthetic construct
  misc_feature 1..24: note = Synthetic
  source 1..24: mol_type = other RNA
agatgccagtattctacaggaaaa

SEQ ID NO: 329 - RNA, 25 nt, synthetic construct
  misc_feature 1..25: note = Synthetic
  source 1..25: mol_type = other RNA
agatgccagtattctacaggaaaaa

SEQ ID NO: 330 - RNA, 23 nt, synthetic construct
  misc_feature 1..23: note = Synthetic
  source 1..23: mol_type = other RNA
gatgccagtattctacaggaaaa

SEQ ID NO: 331 - RNA, 24 nt, synthetic construct
  misc_feature 1..24: note = Synthetic
  source 1..24: mol_type = other RNA
gatgccagtattctacaggaaaaa

SEQ ID NO: 332 - RNA, 25 nt, synthetic construct
  misc_feature 1..25: note = Synthetic
  source 1..25: mol_type = other RNA
gatgccagtattctacaggaaaaat

SEQ ID NO: 333 - RNA, 23 nt, synthetic construct
  misc_feature 1..23: note = Synthetic
  source 1..23: mol_type = other RNA
cagaaaaaagaggtagggcgaca

SEQ ID NO: 334 - RNA, 24 nt, synthetic construct
  misc_feature 1..24: note = Synthetic
  source 1..24: mol_type = other RNA
cagaaaaaagaggtagggcgacag

SEQ ID NO: 335 - RNA, 25 nt, synthetic construct
  misc_feature 1..25: note = Synthetic
  source 1..25: mol_type = other RNA
cagaaaaaagaggtagggcgacaga

SEQ ID NO: 336 - RNA, 22 nt, synthetic construct
  misc_feature 1..22: note = Synthetic
  source 1..22: mol_type = other RNA
agaaaaaagaggtagggcgaca

SEQ ID NO: 337 - RNA, 23 nt, synthetic construct
  misc_feature 1..23: note = Synthetic
  source 1..23: mol_type = other RNA
agaaaaaagaggtagggcgacag

SEQ ID NO: 338 - RNA, 24 nt, synthetic construct
  misc_feature 1..24: note = Synthetic
  source 1..24: mol_type = other RNA
agaaaaaagaggtagggcgacaga

SEQ ID NO: 339 - RNA, 25 nt, synthetic construct
  misc_feature 1..25: note = Synthetic
  source 1..25: mol_type = other RNA
agaaaaaagaggtagggcgacagat

SEQ ID NO: 340 - RNA, 21 nt, synthetic construct
  misc_feature 1..21: note = Synthetic
  source 1..21: mol_type = other RNA
gaaaaaagaggtagggcgaca

SEQ ID NO: 341 - RNA, 22 nt, synthetic construct
  misc_feature 1..22: note = Synthetic
  source 1..22: mol_type = other RNA
gaaaaaagaggtagggcgacag

SEQ ID NO: 342 - RNA, 23 nt, synthetic construct
  misc_feature 1..23: note = Synthetic
  source 1..23: mol_type = other RNA
gaaaaaagaggtagggcgacaga

SEQ ID NO: 343 - RNA, 24 nt, synthetic construct
  misc_feature 1..24: note = Synthetic
  source 1..24: mol_type = other RNA
gaaaaaagaggtagggcgacagat

SEQ ID NO: 344 - RNA, 25 nt, synthetic construct
  misc_feature 1..25: note = Synthetic
  source 1..25: mol_type = other RNA
gaaaaaagaggtagggcgacagatc

SEQ ID NO: 345 - RNA, 20 nt, synthetic construct
  misc_feature 1..20: note = Synthetic
  source 1..20: mol_type = other RNA
aaaaaagaggtagggcgaca

SEQ ID NO: 346 - RNA, 21 nt, synthetic construct
  misc_feature 1..21: note = Synthetic
  source 1..21: mol_type = other RNA
aaaaaagaggtagggcgacag

SEQ ID NO: 347 - RNA, 22 nt, synthetic construct
  misc_feature 1..22: note = Synthetic
  source 1..22: mol_type = other RNA
aaaaaagaggtagggcgacaga

SEQ ID NO: 348 - RNA, 23 nt, synthetic construct
  misc_feature 1..23: note = Synthetic
  source 1..23: mol_type = other RNA
aaaaaagaggtagggcgacagat

SEQ ID NO: 349 - RNA, 24 nt, synthetic construct
  misc_feature 1..24: note = Synthetic
  source 1..24: mol_type = other RNA
aaaaaagaggtagggcgacagatc

SEQ ID NO: 350 - RNA, 25 nt, synthetic construct
  misc_feature 1..25: note = Synthetic
  source 1..25: mol_type = other RNA
aaaaaagaggtagggcgacagatct

SEQ ID NO: 351 - RNA, 20 nt, synthetic construct
  misc_feature 1..20: note = Synthetic
  source 1..20: mol_type = other RNA
aaaaagaggtagggcgacag

SEQ ID NO: 352 - RNA, 21 nt, synthetic construct
  misc_feature 1..21: note = Synthetic
  source 1..21: mol_type = other RNA
aaaaagaggtagggcgacaga

SEQ ID NO: 353 - RNA, 22 nt, synthetic construct
  misc_feature 1..22: note = Synthetic
  source 1..22: mol_type = other RNA
aaaaagaggtagggcgacagat

SEQ ID NO: 354 - RNA, 23 nt, synthetic construct
  misc_feature 1..23: note = Synthetic
  source 1..23: mol_type = other RNA
aaaaagaggtagggcgacagatc

SEQ ID NO: 355 - RNA, 24 nt, synthetic construct
  misc_feature 1..24: note = Synthetic
  source 1..24: mol_type = other RNA
aaaaagaggtagggcgacagatct

SEQ ID NO: 356 - RNA, 20 nt, synthetic construct
  misc_feature 1..20: note = Synthetic
  source 1..20: mol_type = other RNA
aaaagaggtagggcgacaga

SEQ ID NO: 357 - RNA, 21 nt, synthetic construct
  misc_feature 1..21: note = Synthetic
  source 1..21: mol_type = other RNA
aaaagaggtagggcgacagat

SEQ ID NO: 358 - RNA, 22 nt, synthetic construct
  misc_feature 1..22: note = Synthetic
  source 1..22: mol_type = other RNA
aaaagaggtagggcgacagatc

SEQ ID NO: 359 - RNA, 23 nt, synthetic construct
  misc_feature 1..23: note = Synthetic
  source 1..23: mol_type = other RNA
aaaagaggtagggcgacagatct

SEQ ID NO: 360 - RNA, 20 nt, synthetic construct
  misc_feature 1..20: note = Synthetic
  source 1..20: mol_type = other RNA
aaagaggtagggcgacagat

SEQ ID NO: 361 - RNA, 21 nt, synthetic construct
  misc_feature 1..21: note = Synthetic
  source 1..21: mol_type = other RNA
aaagaggtagggcgacagatc

SEQ ID NO: 362 - RNA, 22 nt, synthetic construct
  misc_feature 1..22: note = Synthetic
  source 1..22: mol_type = other RNA
aaagaggtagggcgacagatct

SEQ ID NO: 363 - RNA, 20 nt, synthetic construct
  misc_feature 1..20: note = Synthetic
  source 1..20: mol_type = other RNA
aagaggtagggcgacagatc

SEQ ID NO: 364 - RNA, 21 nt, synthetic construct
  misc_feature 1..21: note = Synthetic
  source 1..21: mol_type = other RNA
aagaggtagggcgacagatct

SEQ ID NO: 365 - RNA, 20 nt, synthetic construct
  misc_feature 1..20: note = Synthetic
  source 1..20: mol_type = other RNA
agaggtagggcgacagatct

SEQ ID NO: 366 - RNA, 25 nt, synthetic construct
  misc_feature 1..25: note = Synthetic
  source 1..25: mol_type = other RNA
agaggtagggcgacagatctaatag

SEQ ID NO: 367 - RNA, 24 nt, synthetic construct
  misc_feature 1..24: note = Synthetic
  source 1..24: mol_type = other RNA
gaggtagggcgacagatctaatag

SEQ ID NO: 368 - RNA, 25 nt, synthetic construct
  misc_feature 1..25: note = Synthetic
  source 1..25: mol_type = other RNA
gaggtagggcgacagatctaatagg

SEQ ID NO: 369 - RNA, 23 nt, synthetic construct
  misc_feature 1..23: note = Synthetic
  source 1..23: mol_type = other RNA
aggtagggcgacagatctaatag

SEQ ID NO: 370 - RNA, 24 nt, synthetic construct
  misc_feature 1..24: note = Synthetic
  source 1..24: mol_type = other RNA
aggtagggcgacagatctaatagg

SEQ ID NO: 371 - RNA, 25 nt, synthetic construct
  misc_feature 1..25: note = Synthetic
  source 1..25: mol_type = other RNA
aggtagggcgacagatctaatagga

SEQ ID NO: 372 - RNA, 22 nt, synthetic construct
  misc_feature 1..22: note = Synthetic
  source 1..22: mol_type = other RNA
ggtagggcgacagatctaatag

SEQ ID NO: 373 - RNA, 23 nt, synthetic construct
  misc_feature 1..23: note = Synthetic
  source 1..23: mol_type = other RNA
ggtagggcgacagatctaatagg

SEQ ID NO: 374 - RNA, 24 nt, synthetic construct
  misc_feature 1..24: note = Synthetic
  source 1..24: mol_type = other RNA
ggtagggcgacagatctaatagga

SEQ ID NO: 375 - RNA, 25 nt, synthetic construct
  misc_feature 1..25: note = Synthetic
  source 1..25: mol_type = other RNA
ggtagggcgacagatctaataggaa

SEQ ID NO: 376 - RNA, 21 nt, synthetic construct
  misc_feature 1..21: note = Synthetic
  source 1..21: mol_type = other RNA
gtagggcgacagatctaatag

SEQ ID NO: 377 - RNA, 22 nt, synthetic construct
  misc_feature 1..22: note = Synthetic
  source 1..22: mol_type = other RNA
gtagggcgacagatctaatagg

SEQ ID NO: 378 - RNA, 23 nt, synthetic construct
  misc_feature 1..23: note = Synthetic
  source 1..23: mol_type = other RNA
gtagggcgacagatctaatagga

SEQ ID NO: 379 - RNA, 24 nt, synthetic construct
  misc_feature 1..24: note = Synthetic
  source 1..24: mol_type = other RNA
gtagggcgacagatctaataggaa

SEQ ID NO: 380 - RNA, 25 nt, synthetic construct
  misc_feature 1..25: note = Synthetic
  source 1..25: mol_type = other RNA
gtagggcgacagatctaataggaat

SEQ ID NO: 381 - RNA, 22 nt, synthetic construct
  misc_feature 1..22: note = Synthetic
  source 1..22: mol_type = other RNA
tagggcgacagatctaatagga

SEQ ID NO: 382 - RNA, 23 nt, synthetic construct
  misc_feature 1..23: note = Synthetic
  source 1..23: mol_type = other RNA
tagggcgacagatctaataggaa

SEQ ID NO: 383 - RNA, 24 nt, synthetic construct
  misc_feature 1..24: note = Synthetic
  source 1..24: mol_type = other RNA
tagggcgacagatctaataggaat

SEQ ID NO: 384 - RNA, 21 nt, synthetic construct
  misc_feature 1..21: note = Synthetic
  source 1..21: mol_type = other RNA
agggcgacagatctaatagga

SEQ ID NO: 385 - RNA, 22 nt, synthetic construct
  misc_feature 1..22: note = Synthetic
  source 1..22: mol_type = other RNA
agggcgacagatctaataggaa

SEQ ID NO: 386 - RNA, 23 nt, synthetic construct
  misc_feature 1..23: note = Synthetic
  source 1..23: mol_type = other RNA
agggcgacagatctaataggaat

SEQ ID NO: 387 - RNA, 20 nt, synthetic construct
  misc_feature 1..20: note = Synthetic
  source 1..20: mol_type = other RNA
gggcgacagatctaatagga

SEQ ID NO: 388 - RNA, 21 nt, synthetic construct
  misc_feature 1..21: note = Synthetic
  source 1..21: mol_type = other RNA
gggcgacagatctaataggaa

SEQ ID NO: 389 - RNA, 22 nt, synthetic construct
  misc_feature 1..22: note = Synthetic
  source 1..22: mol_type = other RNA
gggcgacagatctaataggaat

SEQ ID NO: 390 - RNA, 21 nt, synthetic construct
  misc_feature 1..21: note = Synthetic
  source 1..21: mol_type = other RNA
agattataagcagggtgaaag

SEQ ID NO: 391 - RNA, 22 nt, synthetic construct
  misc_feature 1..22: note = Synthetic
  source 1..22: mol_type = other RNA
agattataagcagggtgaaagg

SEQ ID NO: 392 - RNA, 23 nt, synthetic construct
  misc_feature 1..23: note = Synthetic
  source 1..23: mol_type = other RNA
agattataagcagggtgaaaggc

SEQ ID NO: 393 - RNA, 24 nt, synthetic construct
  misc_feature 1..24: note = Synthetic
  source 1..24: mol_type = other RNA
agattataagcagggtgaaaggca

SEQ ID NO: 394 - RNA, 25 nt, synthetic construct
  misc_feature 1..25: note = Synthetic
  source 1..25: mol_type = other RNA
agattataagcagggtgaaaggcac

SEQ ID NO: 395 - RNA, 20 nt, synthetic construct
  misc_feature 1..20: note = Synthetic
  source 1..20: mol_type = other RNA
gattataagcagggtgaaag

SEQ ID NO: 396 - RNA, 21 nt, synthetic construct
  misc_feature 1..21: note = Synthetic
  source 1..21: mol_type = other RNA
gattataagcagggtgaaagg

SEQ ID NO: 397 - RNA, 22 nt, synthetic construct
  misc_feature 1..22: note = Synthetic
  source 1..22: mol_type = other RNA
gattataagcagggtgaaaggc

SEQ ID NO: 398 - RNA, 23 nt, synthetic construct
  misc_feature 1..23: note = Synthetic
  source 1..23: mol_type = other RNA
gattataagcagggtgaaaggca

SEQ ID NO: 399 - RNA, 24 nt, synthetic construct
  misc_feature 1..24: note = Synthetic
  source 1..24: mol_type = other RNA
gattataagcagggtgaaaggcac

SEQ ID NO: 400 - RNA, 25 nt, synthetic construct
  misc_feature 1..25: note = Synthetic
  source 1..25: mol_type = other RNA
accacatgcagttgtactggcaaag

SEQ ID NO: 401 - RNA, 24 nt, synthetic construct
  misc_feature 1..24: note = Synthetic
  source 1..24: mol_type = other RNA
taccacatgcagttgtactggcaa

SEQ ID NO: 402 - RNA, 25 nt, synthetic construct
  misc_feature 1..25: note = Synthetic
  source 1..25: mol_type = other RNA
ctaccacatgcagttgtactggcaa

SEQ ID NO: 403 - RNA, 22 nt, synthetic construct
  misc_feature 1..22: note = Synthetic
  source 1..22: mol_type = other RNA
accacatgcagttgtactggca

SEQ ID NO: 404 - RNA, 23 nt, synthetic construct
  misc_feature 1..23: note = Synthetic
  source 1..23: mol_type = other RNA
taccacatgcagttgtactggca

SEQ ID NO: 405 - RNA, 24 nt, synthetic construct
  misc_feature 1..24: note = Synthetic
  source 1..24: mol_type = other RNA
ctaccacatgcagttgtactggca

SEQ ID NO: 406 - RNA, 25 nt, synthetic construct
  misc_feature 1..25: note = Synthetic
  source 1..25: mol_type = other RNA
gctaccacatgcagttgtactggca

SEQ ID NO: 407 - RNA, 21 nt, synthetic construct
  misc_feature 1..21: note = Synthetic
  source 1..21: mol_type = other RNA
accacatgcagttgtactggc

SEQ ID NO: 408 - RNA, 22 nt, synthetic construct
  misc_feature 1..22: note = Synthetic
  source 1..22: mol_type = other RNA
taccacatgcagttgtactggc

SEQ ID NO: 409 - RNA, 23 nt, synthetic construct
  misc_feature 1..23: note = Synthetic
  source 1..23: mol_type = other RNA
ctaccacatgcagttgtactggc

SEQ ID NO: 410 - RNA, 24 nt, synthetic construct
  misc_feature 1..24: note = Synthetic
  source 1..24: mol_type = other RNA
gctaccacatgcagttgtactggc

SEQ ID NO: 411 - RNA, 25 nt, synthetic construct
  misc_feature 1..25: note = Synthetic
  source 1..25: mol_type = other RNA
tgctaccacatgcagttgtactggc

SEQ ID NO: 412 - RNA, 22 nt, synthetic construct
  misc_feature 1..22: note = Synthetic
  source 1..22: mol_type = other RNA
ctaccacatgcagttgtactgg

SEQ ID NO: 413 - RNA, 23 nt, synthetic construct
  misc_feature 1..23: note = Synthetic
  source 1..23: mol_type = other RNA
gctaccacatgcagttgtactgg

SEQ ID NO: 414 - RNA, 24 nt, synthetic construct
  misc_feature 1..24: note = Synthetic
  source 1..24: mol_type = other RNA
tgctaccacatgcagttgtactgg

SEQ ID NO: 415 - RNA, 22 nt, synthetic construct
  misc_feature 1..22: note = Synthetic
  source 1..22: mol_type = other RNA
gctaccacatgcagttgtactg

SEQ ID NO: 416 - RNA, 23 nt, synthetic construct
  misc_feature 1..23: note = Synthetic
  source 1..23: mol_type = other RNA
tgctaccacatgcagttgtactg

SEQ ID NO: 417 - RNA, 21 nt, synthetic construct
  misc_feature 1..21: note = Synthetic
  source 1..21: mol_type = other RNA
gctaccacatgcagttgtact

SEQ ID NO: 418 - RNA, 22 nt, synthetic construct
  misc_feature 1..22: note = Synthetic
  source 1..22: mol_type = other RNA
tgctaccacatgcagttgtact

SEQ ID NO: 419 - RNA, 22 nt, synthetic construct
  misc_feature 1..22: note = Synthetic
  source 1..22: mol_type = other RNA
gtgctaccacatgcagttgtac

SEQ ID NO: 420 - RNA, 23 nt, synthetic construct
  misc_feature 1..23: note = Synthetic
  source 1..23: mol_type = other RNA
tgtgctaccacatgcagttgtac

SEQ ID NO: 421 - RNA, 21 nt, synthetic construct
  misc_feature 1..21: note = Synthetic
  source 1..21: mol_type = other RNA
tgaagccccatgtctttttat

SEQ ID NO: 422 - RNA, 23 nt, synthetic construct
  misc_feature 1..23: note = Synthetic
  source 1..23: mol_type = other RNA
gccatcctggagttcctgtaaga

SEQ ID NO: 423 - RNA, 24 nt, synthetic construct
  misc_feature 1..24: note = Synthetic
  source 1..24: mol_type = other RNA
tgccatcctggagttcctgtaaga

SEQ ID NO: 424 - RNA, 25 nt, synthetic construct
  misc_feature 1..25: note = Synthetic
  source 1..25: mol_type = other RNA
atgccatcctggagttcctgtaaga

SEQ ID NO: 425 - RNA, 23 nt, synthetic construct
  misc_feature 1..23: note = Synthetic
  source 1..23: mol_type = other RNA
tgccatcctggagttcctgtaag

SEQ ID NO: 426 - RNA, 24 nt, synthetic construct
  misc_feature 1..24: note = Synthetic
  source 1..24: mol_type = other RNA
atgccatcctggagttcctgtaag

SEQ ID NO: 427 - RNA, 25 nt, synthetic construct
  misc_feature 1..25: note = Synthetic
  source 1..25: mol_type = other RNA
aatgccatcctggagttcctgtaag

SEQ ID NO: 428 - RNA, 20 nt, synthetic construct
  misc_feature 1..20: note = Synthetic
  source 1..20: mol_type = other RNA
gccatcctggagttcctgta

SEQ ID NO: 429 - RNA, 21 nt, synthetic construct
  misc_feature 1..21: note = Synthetic
  source 1..21: mol_type = other RNA
tgccatcctggagttcctgta

SEQ ID NO: 430 - RNA, 22 nt, synthetic construct
  misc_feature 1..22: note = Synthetic
  source 1..22: mol_type = other RNA
atgccatcctggagttcctgta

SEQ ID NO: 431 - RNA, 23 nt, synthetic construct
  misc_feature 1..23: note = Synthetic
  source 1..23: mol_type = other RNA
aatgccatcctggagttcctgta

SEQ ID NO: 432 - RNA, 25 nt, synthetic construct
  misc_feature 1..25: note = Synthetic
  source 1..25: mol_type = other RNA
ccaatgccatcctggagttcctgta

SEQ ID NO: 433 - RNA, 20 nt, synthetic construct
  misc_feature 1..20: note = Synthetic
  source 1..20: mol_type = other RNA
tgccatcctggagttcctgt

SEQ ID NO: 434 - RNA, 21 nt, synthetic construct
  misc_feature 1..21: note = Synthetic
  source 1..21: mol_type = other RNA
atgccatcctggagttcctgt

SEQ ID NO: 435 - RNA, 22 nt, synthetic construct
  misc_feature 1..22: note = Synthetic
  source 1..22: mol_type = other RNA
aatgccatcctggagttcctgt

SEQ ID NO: 436 - RNA, 24 nt, synthetic construct
  misc_feature 1..24: note = Synthetic
  source 1..24: mol_type = other RNA
ccaatgccatcctggagttcctgt

SEQ ID NO: 437 - RNA, 25 nt, synthetic construct
  misc_feature 1..25: note = Synthetic
  source 1..25: mol_type = other RNA
cccaatgccatcctggagttcctgt

SEQ ID NO: 438 - RNA, 20 nt, synthetic construct
  misc_feature 1..20: note = Synthetic
  source 1..20: mol_type = other RNA
atgccatcctggagttcctg

SEQ ID NO: 439 - RNA, 21 nt, synthetic construct
  misc_feature 1..21: note = Synthetic
  source 1..21: mol_type = other RNA
aatgccatcctggagttcctg

SEQ ID NO: 440 - RNA, 23 nt, synthetic construct
  misc_feature 1..23: note = Synthetic
  source 1..23: mol_type = other RNA
ccaatgccatcctggagttcctg

SEQ ID NO: 441 - RNA, 24 nt, synthetic construct
  misc_feature 1..24: note = Synthetic
  source 1..24: mol_type = other RNA
cccaatgccatcctggagttcctg

SEQ ID NO: 442 - RNA, 25 nt, synthetic construct
  misc_feature 1..25: note = Synthetic
  source 1..25: mol_type = other RNA
gcccaatgccatcctggagttcctg

SEQ ID NO: 443 - RNA, 20 nt, synthetic construct
  misc_feature 1..20: note = Synthetic
  source 1..20: mol_type = other RNA
aatgccatcctggagttcct

SEQ ID NO: 444 - RNA, 22 nt, synthetic construct
  misc_feature 1..22: note = Synthetic
  source 1..22: mol_type = other RNA
ccaatgccatcctggagttcct

SEQ ID NO: 445 - RNA, 23 nt, synthetic construct
  misc_feature 1..23: note = Synthetic
  source 1..23: mol_type = other RNA
cccaatgccatcctggagttcct

SEQ ID NO: 446 - RNA, 24 nt, synthetic construct
  misc_feature 1..24: note = Synthetic
  source 1..24: mol_type = other RNA
gcccaatgccatcctggagttcct

SEQ ID NO: 447 - RNA, 25 nt, synthetic construct
  misc_feature 1..25: note = Synthetic
  source 1..25: mol_type = other RNA
tgcccaatgccatcctggagttcct

SEQ ID NO: 448 - RNA, 21 nt, synthetic construct
  misc_feature 1..21: note = Synthetic
  source 1..21: mol_type = other RNA
ccaatgccatcctggagttcc

SEQ ID NO: 449 - RNA, 22 nt, synthetic construct
  misc_feature 1..22: note = Synthetic
  source 1..22: mol_type = other RNA
cccaatgccatcctggagttcc

SEQ ID NO: 450 - RNA, 24 nt, synthetic construct
  misc_feature 1..24: note = Synthetic
  source 1..24: mol_type = other RNA
tgcccaatgccatcctggagttcc

SEQ ID NO: 451 - RNA, 25 nt, synthetic construct
  misc_feature 1..25: note = Synthetic
  source 1..25: mol_type = other RNA
ctgcccaatgccatcctggagttcc

SEQ ID NO: 452 - RNA, 20 nt, synthetic construct
  misc_feature 1..20: note = Synthetic
  source 1..20: mol_type = other RNA
ccaatgccatcctggagttc

SEQ ID NO: 453 - RNA, 21 nt, synthetic construct
  misc_feature 1..21: note = Synthetic
  source 1..21: mol_type = other RNA
cccaatgccatcctggagttc

SEQ ID NO: 454 - RNA, 22 nt, synthetic construct
  misc_feature 1..22: note = Synthetic
  source 1..22: mol_type = other RNA
gcccaatgccatcctggagttc

SEQ ID NO: 455 - RNA, 23 nt, synthetic construct
  misc_feature 1..23: note = Synthetic
  source 1..23: mol_type = other RNA
tgcccaatgccatcctggagttc

SEQ ID NO: 456 - RNA, 24 nt, synthetic construct
  misc_feature 1..24: note = Synthetic
  source 1..24: mol_type = other RNA
ctgcccaatgccatcctggagttc

SEQ ID NO: 457 - RNA, 25 nt, synthetic construct
  misc_feature 1..25: note = Synthetic
  source 1..25: mol_type = other RNA
gctgcccaatgccatcctggagttc

SEQ ID NO: 458 - RNA, 20 nt, synthetic construct
  misc_feature 1..20: note = Synthetic
  source 1..20: mol_type = other RNA
cccaatgccatcctggagtt

SEQ ID NO: 459 - RNA, 21 nt, synthetic construct
  misc_feature 1..21: note = Synthetic
  source 1..21: mol_type = other RNA
gcccaatgccatcctggagtt

SEQ ID NO: 460 - RNA, 22 nt, synthetic construct
  misc_feature 1..22: note = Synthetic
  source 1..22: mol_type = other RNA
tgcccaatgccatcctggagtt

SEQ ID NO: 461 - RNA, 23 nt, synthetic construct
  misc_feature 1..23: note = Synthetic
  source 1..23: mol_type = other RNA
ctgcccaatgccatcctggagtt

SEQ ID NO: 462 - RNA, 24 nt, synthetic construct
  misc_feature 1..24: note = Synthetic
  source 1..24: mol_type = other RNA
gctgcccaatgccatcctggagtt

SEQ ID NO: 463 - RNA, 20 nt, synthetic construct
  misc_feature 1..20: note = Synthetic
  source 1..20: mol_type = other RNA
gcccaatgccatcctggagt

SEQ ID NO: 464 - RNA, 21 nt, synthetic construct
  misc_feature 1..21: note = Synthetic
  source 1..21: mol_type = other RNA
tgcccaatgccatcctggagt

SEQ ID NO: 465 - RNA, 22 nt, synthetic construct
  misc_feature 1..22: note = Synthetic
  source 1..22: mol_type = other RNA
ctgcccaatgccatcctggagt

SEQ ID NO: 466 - RNA, 20 nt, synthetic construct
  misc_feature 1..20: note = Synthetic
  source 1..20: mol_type = other RNA
tgcccaatgccatcctggag

SEQ ID NO: 467 - RNA, 24 nt, synthetic construct
  misc_feature 1..24: note = Synthetic
  source 1..24: mol_type = other RNA
tccccagttgcattcaatgttctg

SEQ ID NO: 468 - RNA, 23 nt, synthetic construct
  misc_feature 1..23: note = Synthetic
  source 1..23: mol_type = other RNA
tccccagttgcattcaatgttct

SEQ ID NO: 469 - RNA, 25 nt, synthetic construct
  misc_feature 1..25: note = Synthetic
  source 1..25: mol_type = other RNA
cttccccagttgcattcaatgttct

SEQ ID NO: 470 - RNA, 25 nt, synthetic construct
  misc_feature 1..25: note = Synthetic
  source 1..25: mol_type = other RNA
tcttccccagttgcattcaatgttc

SEQ ID NO: 471 - RNA, 25 nt, synthetic construct
  misc_feature 1..25: note = Synthetic
  source 1..25: mol_type = other RNA
atttcttccccagttgcattcaatg

SEQ ID NO: 472 - RNA, 24 nt, synthetic construct
  misc_feature 1..24: note = Synthetic
  source 1..24: mol_type = other RNA
atttcttccccagttgcattcaat

SEQ ID NO: 473 - RNA, 25 nt, synthetic construct
  misc_feature 1..25: note = Synthetic
  source 1..25: mol_type = other RNA
tatttcttccccagttgcattcaat

SEQ ID NO: 474 - RNA, 23 nt, synthetic construct
  misc_feature 1..23: note = Synthetic
  source 1..23: mol_type = other RNA
atttcttccccagttgcattcaa

SEQ ID NO: 475 - RNA, 24 nt, synthetic construct
  misc_feature 1..24: note = Synthetic
  source 1..24: mol_type = other RNA
tatttcttccccagttgcattcaa

SEQ ID NO: 476 - RNA, 25 nt, synthetic construct
  misc_feature 1..25: note = Synthetic
  source 1..25: mol_type = other RNA
ttatttcttccccagttgcattcaa

SEQ ID NO: 477 - RNA, 20 nt, synthetic construct
  misc_feature 1..20: note = Synthetic
  source 1..20: mol_type = other RNA
ttcttccccagttgcattca

SEQ ID NO: 478 - RNA, 22 nt, synthetic construct
  misc_feature 1..22: note = Synthetic
  source 1..22: mol_type = other RNA
atttcttccccagttgcattca

SEQ ID NO: 479 - RNA, 23 nt, synthetic construct
  misc_feature 1..23: note = Synthetic
  source 1..23: mol_type = other RNA
tatttcttccccagttgcattca

SEQ ID NO: 480 - RNA, 24 nt, synthetic construct
  misc_feature 1..24: note = Synthetic
  source 1..24: mol_type = other RNA
ttatttcttccccagttgcattca

SEQ ID NO: 481 - RNA, 21 nt, synthetic construct
  misc_feature 1..21: note = Synthetic
  source 1..21: mol_type = other RNA
atttcttccccagttgcattc

SEQ ID NO: 482 - RNA, 22 nt, synthetic construct
  misc_feature 1..22: note = Synthetic
  source 1..22: mol_type = other RNA
tatttcttccccagttgcattc

SEQ ID NO: 483 - RNA, 23 nt, synthetic construct
  misc_feature 1..23: note = Synthetic
  source 1..23: mol_type = other RNA
ttatttcttccccagttgcattc

SEQ ID NO: 484 - RNA, 21 nt, synthetic construct
  misc_feature 1..21: note = Synthetic
  source 1..21: mol_type = other RNA
tatttcttccccagttgcatt

SEQ ID NO: 485 - RNA, 20 nt, synthetic construct
  misc_feature 1..20: note = Synthetic
  source 1..20: mol_type = other RNA
tatttcttccccagttgcat

SEQ ID NO: 486 - RNA, 21 nt, synthetic construct
  misc_feature 1..21: note = Synthetic
  source 1..21: mol_type = other RNA
ttatttcttccccagttgcat

SEQ ID NO: 487 - RNA, 22 nt, synthetic construct
  misc_feature 1..22: note = Synthetic
  source 1..22: mol_type = other RNA
attatttcttccccagttgcat

SEQ ID NO: 488 - RNA, 24 nt, synthetic construct
  misc_feature 1..24: note = Synthetic
  source 1..24: mol_type = other RNA
tctgtttttgaggattgctgaatt

SEQ ID NO: 489 - RNA, 25 nt, synthetic construct
  misc_feature 1..25: note = Synthetic
  source 1..25: mol_type = other RNA
atctgtttttgaggattgctgaatt

SEQ ID NO: 490 - RNA, 22 nt, synthetic construct
  misc_feature 1..22: note = Synthetic
  source 1..22: mol_type = other RNA
ctgtttttgaggattgctgaat

SEQ ID NO: 491 - RNA, 23 nt, synthetic construct
  misc_feature 1..23: note = Synthetic
  source 1..23: mol_type = other RNA
tctgtttttgaggattgctgaat

SEQ ID NO: 492 - RNA, 24 nt, synthetic construct
  misc_feature 1..24: note = Synthetic
  source 1..24: mol_type = other RNA
atctgtttttgaggattgctgaat

SEQ ID NO: 493 - RNA, 25 nt, synthetic construct
  misc_feature 1..25: note = Synthetic
  source 1..25: mol_type = other RNA
catctgtttttgaggattgctgaat

SEQ ID NO: 494 - RNA, 22 nt, synthetic construct
  misc_feature 1..22: note = Synthetic
  source 1..22: mol_type = other RNA
tctgtttttgaggattgctgaa

SEQ ID NO: 495 - RNA, 23 nt, synthetic construct
  misc_feature 1..23: note = Synthetic
  source 1..23: mol_type = other RNA
atctgtttttgaggattgctgaa

SEQ ID NO: 496 - RNA, 24 nt, synthetic construct
  misc_feature 1..24: note = Synthetic
  source 1..24: mol_type = other RNA
catctgtttttgaggattgctgaa

SEQ ID NO: 497 - RNA, 20 nt, synthetic construct
  misc_feature 1..20: note = Synthetic
  source 1..20: mol_type = other RNA
ctgtttttgaggattgctga

SEQ ID NO: 498 - RNA, 21 nt, synthetic construct
  misc_feature 1..21: note = Synthetic
  source 1..21: mol_type = other RNA
tctgtttttgaggattgctga

SEQ ID NO: 499 - RNA, 22 nt, synthetic construct
  misc_feature 1..22: note = Synthetic
  source 1..22: mol_type = other RNA
atctgtttttgaggattgctga

SEQ ID NO: 500 - RNA, 23 nt, synthetic construct
  misc_feature 1..23: note = Synthetic
  source 1..23: mol_type = other RNA
catctgtttttgaggattgctga

SEQ ID NO: 501 - RNA, 20 nt, synthetic construct
  misc_feature 1..20: note = Synthetic
  source 1..20: mol_type = other RNA
tctgtttttgaggattgctg

SEQ ID NO: 502 - RNA, 21 nt, synthetic construct
  misc_feature 1..21: note = Synthetic
  source 1..21: mol_type = other RNA
atctgtttttgaggattgctg

SEQ ID NO: 503 - RNA, 22 nt, synthetic construct
  misc_feature 1..22: note = Synthetic
  source 1..22: mol_type = other RNA
catctgtttttgaggattgctg

SEQ ID NO: 504 - RNA, 20 nt, synthetic construct
  misc_feature 1..20: note = Synthetic
  source 1..20: mol_type = other RNA
atctgtttttgaggattgct

SEQ ID NO: 505 - RNA, 21 nt, synthetic construct
  misc_feature 1..21: note = Synthetic
  source 1..21: mol_type = other RNA
catctgtttttgaggattgct

SEQ ID NO: 506 - RNA, 21 nt, synthetic construct
  misc_feature 1..21: note = Synthetic
  source 1..21: mol_type = other RNA
gcatctgtttttgaggattgc

SEQ ID NO: 507 - RNA, 22 nt, synthetic construct
  misc_feature 1..22: note = Synthetic
  source 1..22: mol_type = other RNA
ggcatctgtttttgaggattgc

SEQ ID NO: 508 - RNA, 23 nt, synthetic construct
  misc_feature 1..23: note = Synthetic
  source 1..23: mol_type = other RNA
tggcatctgtttttgaggattgc

SEQ ID NO: 509 - RNA, 21 nt, synthetic construct
  misc_feature 1..21: note = Synthetic
  source 1..21: mol_type = other RNA
ggcatctgtttttgaggattg

SEQ ID NO: 510 - RNA, 22 nt, synthetic construct
  misc_feature 1..22: note = Synthetic
  source 1..22: mol_type = other RNA
tggcatctgtttttgaggattg

SEQ ID NO: 511 - RNA, 25 nt, synthetic construct
  misc_feature 1..25: note = Synthetic
  source 1..25: mol_type = other RNA
tactggcatctgtttttgaggattg

SEQ ID NO: 512 - RNA, 20 nt, synthetic construct
  misc_feature 1..20: note = Synthetic
  source 1..20: mol_type = other RNA
ggcatctgtttttgaggatt

SEQ ID NO: 513 - RNA, 21 nt, synthetic construct
  misc_feature 1..21: note = Synthetic
  source 1..21: mol_type = other RNA
tggcatctgtttttgaggatt

SEQ ID NO: 514 - RNA, 24 nt, synthetic construct
  misc_feature 1..24: note = Synthetic
  source 1..24: mol_type = other RNA
tactggcatctgtttttgaggatt

SEQ ID NO: 515 - RNA, 25 nt, synthetic construct
  misc_feature 1..25: note = Synthetic
  source 1..25: mol_type = other RNA
atactggcatctgtttttgaggatt

SEQ ID NO: 516 - RNA, 20 nt, synthetic construct
  misc_feature 1..20: note = Synthetic
  source 1..20: mol_type = other RNA
tggcatctgtttttgaggat

SEQ ID NO: 517 - RNA, 23 nt, synthetic construct
  misc_feature 1..23: note = Synthetic
  source 1..23: mol_type = other RNA
tactggcatctgtttttgaggat

SEQ ID NO: 518 - RNA, 24 nt, synthetic construct
  misc_feature 1..24: note = Synthetic
  source 1..24: mol_type = other RNA
atactggcatctgtttttgaggat

SEQ ID NO: 519 - RNA, 25 nt, synthetic construct
  misc_feature 1..25: note = Synthetic
  source 1..25: mol_type = other RNA
aatactggcatctgtttttgaggat

SEQ ID NO: 520 - RNA, 22 nt, synthetic construct
  misc_feature 1..22: note = Synthetic
  source 1..22: mol_type = other RNA
tactggcatctgtttttgagga

SEQ ID NO: 521 - RNA, 23 nt, synthetic construct
  misc_feature 1..23: note = Synthetic
  source 1..23: mol_type = other RNA
atactggcatctgtttttgagga

SEQ ID NO: 522 - RNA, 24 nt, synthetic construct
  misc_feature 1..24: note = Synthetic
  source 1..24: mol_type = other RNA
aatactggcatctgtttttgagga

SEQ ID NO: 523 - RNA, 21 nt, synthetic construct
  misc_feature 1..21: note = Synthetic
  source 1..21: mol_type = other RNA
tactggcatctgtttttgagg

SEQ ID NO: 524 - RNA, 22 nt, synthetic construct
  misc_feature 1..22: note = Synthetic
  source 1..22: mol_type = other RNA
atactggcatctgtttttgagg

SEQ ID NO: 525 - RNA, 23 nt, synthetic construct
  misc_feature 1..23: note = Synthetic
  source 1..23: mol_type = other RNA
aatactggcatctgtttttgagg

SEQ ID NO: 526 - RNA, 25 nt, synthetic construct
  misc_feature 1..25: note = Synthetic
  source 1..25: mol_type = other RNA
agaatactggcatctgtttttgagg

SEQ ID NO: 527 - RNA, 20 nt, synthetic construct
  misc_feature 1..20: note = Synthetic
  source 1..20: mol_type = other RNA
tactggcatctgtttttgag

SEQ ID NO: 528 - RNA, 21 nt, synthetic construct
  misc_feature 1..21: note = Synthetic
  source 1..21: mol_type = other RNA
atactggcatctgtttttgag

SEQ ID NO: 529 - RNA, 22 nt, synthetic construct
  misc_feature 1..22: note = Synthetic
  source 1..22: mol_type = other RNA
aatactggcatctgtttttgag

SEQ ID NO: 530 - RNA, 24 nt, synthetic construct
  misc_feature 1..24: note = Synthetic
  source 1..24: mol_type = other RNA
agaatactggcatctgtttttgag

SEQ ID NO: 531 - RNA, 25 nt, synthetic construct
  misc_feature 1..25: note = Synthetic
  source 1..25: mol_type = other RNA
tagaatactggcatctgtttttgag

SEQ ID NO: 532 - RNA, 20 nt, synthetic construct
  misc_feature 1..20: note = Synthetic
  source 1..20: mol_type = other RNA
atactggcatctgtttttga

SEQ ID NO: 533 - RNA, 21 nt, synthetic construct
  misc_feature 1..21: note = Synthetic
  source 1..21: mol_type = other RNA
aatactggcatctgtttttga

SEQ ID NO: 534 - RNA, 23 nt, synthetic construct
  misc_feature 1..23: note = Synthetic
  source 1..23: mol_type = other RNA
agaatactggcatctgtttttga

SEQ ID NO: 535 - RNA, 24 nt, synthetic construct
  misc_feature 1..24: note = Synthetic
  source 1..24: mol_type = other RNA
tagaatactggcatctgtttttga

SEQ ID NO: 536 - RNA, 25 nt, synthetic construct
  misc_feature 1..25: note = Synthetic
  source 1..25: mol_type = other RNA
gtagaatactggcatctgtttttga

SEQ ID NO: 537 - RNA, 22 nt, synthetic construct
  misc_feature 1..22: note = Synthetic
  source 1..22: mol_type = other RNA
agaatactggcatctgtttttg

SEQ ID NO: 538 - RNA, 23 nt, synthetic construct
  misc_feature 1..23: note = Synthetic
  source 1..23: mol_type = other RNA
tagaatactggcatctgtttttg

SEQ ID NO: 539 - RNA, 24 nt, synthetic construct
  misc_feature 1..24: note = Synthetic
  source 1..24: mol_type = other RNA
gtagaatactggcatctgtttttg

SEQ ID NO: 540 - RNA, 25 nt, synthetic construct
  misc_feature 1..25: note = Synthetic
  source 1..25: mol_type = other RNA
tgtagaatactggcatctgtttttg

SEQ ID NO: 541 - RNA, 23 nt, synthetic construct
  misc_feature 1..23: note = Synthetic
  source 1..23: mol_type = other RNA
gtagaatactggcatctgttttt

SEQ ID NO: 542 - RNA, 24 nt, synthetic construct
  misc_feature 1..24: note = Synthetic
  source 1..24: mol_type = other RNA
tgtagaatactggcatctgttttt

SEQ ID NO: 543 - RNA, 25 nt, synthetic construct
  misc_feature 1..25: note = Synthetic
  source 1..25: mol_type = other RNA
ctgtagaatactggcatctgttttt

SEQ ID NO: 544 - RNA, 22 nt, synthetic construct
  misc_feature 1..22: note = Synthetic
  source 1..22: mol_type = other RNA
gtagaatactggcatctgtttt

SEQ ID NO: 545 - RNA, 23 nt, synthetic construct
  misc_feature 1..23: note = Synthetic
  source 1..23: mol_type = other RNA
tgtagaatactggcatctgtttt

SEQ ID NO: 546 - RNA, 24 nt, synthetic construct
  misc_feature 1..24: note = Synthetic
  source 1..24: mol_type = other RNA
ctgtagaatactggcatctgtttt

SEQ ID NO: 547 - RNA, 25 nt, synthetic construct
  misc_feature 1..25: note = Synthetic
  source 1..25: mol_type = other RNA
cctgtagaatactggcatctgtttt

SEQ ID NO: 548 - RNA, 21 nt, synthetic construct
  misc_feature 1..21: note = Synthetic
  source 1..21: mol_type = other RNA
gtagaatactggcatctgttt

SEQ ID NO: 549 - RNA, 22 nt, synthetic construct
  misc_feature 1..22: note = Synthetic
  source 1..22: mol_type = other RNA
tgtagaatactggcatctgttt

SEQ ID NO: 550 - RNA, 23 nt, synthetic construct
  misc_feature 1..23: note = Synthetic
  source 1..23: mol_type = other RNA
ctgtagaatactggcatctgttt

SEQ ID NO: 551 - RNA, 24 nt, synthetic construct
  misc_feature 1..24: note = Synthetic
  source 1..24: mol_type = other RNA
cctgtagaatactggcatctgttt

SEQ ID NO: 552 - RNA, 25 nt, synthetic construct
  misc_feature 1..25: note = Synthetic
  source 1..25: mol_type = other RNA
tcctgtagaatactggcatctgttt

SEQ ID NO: 553 - RNA, 20 nt, synthetic construct
  misc_feature 1..20: note = Synthetic
  source 1..20: mol_type = other RNA
gtagaatactggcatctgtt

SEQ ID NO: 554 - RNA, 21 nt, synthetic construct
  misc_feature 1..21: note = Synthetic
  source 1..21: mol_type = other RNA
tgtagaatactggcatctgtt

SEQ ID NO: 555 - RNA, 22 nt, synthetic construct
  misc_feature 1..22: note = Synthetic
  source 1..22: mol_type = other RNA
ctgtagaatactggcatctgtt

SEQ ID NO: 556 - RNA, 23 nt, synthetic construct
  misc_feature 1..23: note = Synthetic
  source 1..23: mol_type = other RNA
cctgtagaatactggcatctgtt

SEQ ID NO: 557 - RNA, 24 nt, synthetic construct
  misc_feature 1..24: note = Synthetic
  source 1..24: mol_type = other RNA
tcctgtagaatactggcatctgtt

SEQ ID NO: 558 - RNA, 25 nt, synthetic construct
  misc_feature 1..25: note = Synthetic
  source 1..25: mol_type = other RNA
ttcctgtagaatactggcatctgtt

SEQ ID NO: 559 - RNA, 20 nt, synthetic construct
  misc_feature 1..20: note = Synthetic
  source 1..20: mol_type = other RNA
tgtagaatactggcatctgt

SEQ ID NO: 560 - RNA, 21 nt, synthetic construct
  misc_feature 1..21: note = Synthetic
  source 1..21: mol_type = other RNA
ctgtagaatactggcatctgt

SEQ ID NO: 561 - RNA, 22 nt, synthetic construct
  misc_feature 1..22: note = Synthetic
  source 1..22: mol_type = other RNA
cctgtagaatactggcatctgt

SEQ ID NO: 562 - RNA, 23 nt, synthetic construct
  misc_feature 1..23: note = Synthetic
  source 1..23: mol_type = other RNA
tcctgtagaatactggcatctgt

SEQ ID NO: 563 - RNA, 24 nt, synthetic construct
  misc_feature 1..24: note = Synthetic
  source 1..24: mol_type = other RNA
ttcctgtagaatactggcatctgt

SEQ ID NO: 564 - RNA, 22 nt, synthetic construct
  misc_feature 1..22: note = Synthetic
  source 1..22: mol_type = other RNA
tcctgtagaatactggcatctg

SEQ ID NO: 565 - RNA, 23 nt, synthetic construct
  misc_feature 1..23: note = Synthetic
  source 1..23: mol_type = other RNA
ttcctgtagaatactggcatctg

SEQ ID NO: 566 - RNA, 25 nt, synthetic construct
  misc_feature 1..25: note = Synthetic
  source 1..25: mol_type = other RNA
ttttcctgtagaatactggcatctg

SEQ ID NO: 567 - RNA, 22 nt, synthetic construct
  misc_feature 1..22: note = Synthetic
  source 1..22: mol_type = other RNA
ttcctgtagaatactggcatct

SEQ ID NO: 568 - RNA, 24 nt, synthetic construct
  misc_feature 1..24: note = Synthetic
  source 1..24: mol_type = other RNA
ttttcctgtagaatactggcatct

SEQ ID NO: 569 - RNA, 25 nt, synthetic construct
  misc_feature 1..25: note = Synthetic
  source 1..25: mol_type = other RNA
tttttcctgtagaatactggcatct

SEQ ID NO: 570 - RNA, 23 nt, synthetic construct
  misc_feature 1..23: note = Synthetic
  source 1..23: mol_type = other RNA
ttttcctgtagaatactggcatc

SEQ ID NO: 571 - RNA, 24 nt, synthetic construct
  misc_feature 1..24: note = Synthetic
  source 1..24: mol_type = other RNA
tttttcctgtagaatactggcatc

SEQ ID NO: 572 - RNA, 25 nt, synthetic construct
  misc_feature 1..25: note = Synthetic
  source 1..25: mol_type = other RNA
atttttcctgtagaatactggcatc

SEQ ID NO: 573 - RNA, 23 nt, synthetic construct
  misc_feature 1..23: note = Synthetic
  source 1..23: mol_type = other RNA
tgtcgccctacctcttttttctg

SEQ ID NO: 574 - RNA, 24 nt, synthetic construct
  misc_feature 1..24: note = Synthetic
  source 1..24: mol_type = other RNA
ctgtcgccctacctcttttttctg

SEQ ID NO: 575 - RNA, 25 nt, synthetic construct
  misc_feature 1..25: note = Synthetic
  source 1..25: mol_type = other RNA
tctgtcgccctacctcttttttctg

SEQ ID NO: 576 - RNA, 22 nt, synthetic construct
  misc_feature 1..22: note = Synthetic
  source 1..22: mol_type = other RNA
tgtcgccctacctcttttttct

SEQ ID NO: 577 - RNA, 23 nt, synthetic construct
  misc_feature 1..23: note = Synthetic
  source 1..23: mol_type = other RNA
ctgtcgccctacctcttttttct

SEQ ID NO: 578 - RNA, 24 nt, synthetic construct
  misc_feature 1..24: note = Synthetic
  source 1..24: mol_type = other RNA
tctgtcgccctacctcttttttct

SEQ ID NO: 579 - RNA, 25 nt, synthetic construct
  misc_feature 1..25: note = Synthetic
  source 1..25: mol_type = other RNA
atctgtcgccctacctcttttttct

SEQ ID NO: 580 - RNA, 21 nt, synthetic construct
  misc_feature 1..21: note = Synthetic
  source 1..21: mol_type = other RNA
tgtcgccctacctcttttttc

SEQ ID NO: 581 - RNA, 22 nt, synthetic construct
  misc_feature 1..22: note = Synthetic
  source 1..22: mol_type = other RNA
ctgtcgccctacctcttttttc

SEQ ID NO: 582 - RNA, 23 nt, synthetic construct
  misc_feature 1..23: note = Synthetic
  source 1..23: mol_type = other RNA
tctgtcgccctacctcttttttc

SEQ ID NO: 583 - RNA, 24 nt, synthetic construct
  misc_feature 1..24: note = Synthetic
  source 1..24: mol_type = other RNA
atctgtcgccctacctcttttttc

SEQ ID NO: 584 - RNA, 25 nt, synthetic construct
  misc_feature 1..25: note = Synthetic
  source 1..25: mol_type = other RNA
gatctgtcgccctacctcttttttc

SEQ ID NO: 585 - RNA, 20 nt, synthetic construct
  misc_feature 1..20: note = Synthetic
  source 1..20: mol_type = other RNA
tgtcgccctacctctttttt

SEQ ID NO: 586 - RNA, 21 nt, synthetic construct
  misc_feature 1..21: note = Synthetic
  source 1..21: mol_type = other RNA
ctgtcgccctacctctttttt

SEQ ID NO: 587 - RNA, 22 nt, synthetic construct
  misc_feature 1..22: note = Synthetic
  source 1..22: mol_type = other RNA
tctgtcgccctacctctttttt

SEQ ID NO: 588 - RNA, 23 nt, synthetic construct
  misc_feature 1..23: note = Synthetic
  source 1..23: mol_type = other RNA
atctgtcgccctacctctttttt

SEQ ID NO: 589 - RNA, 24 nt, synthetic construct
  misc_feature 1..24: note = Synthetic
  source 1..24: mol_type = other RNA
gatctgtcgccctacctctttttt

SEQ ID NO: 590 - RNA, 25 nt, synthetic construct
  misc_feature 1..25: note = Synthetic
  source 1..25: mol_type = other RNA
agatctgtcgccctacctctttttt

SEQ ID NO: 591 - RNA, 20 nt, synthetic construct
  misc_feature 1..20: note = Synthetic
  source 1..20: mol_type = other RNA
ctgtcgccctacctcttttt

SEQ ID NO: 592 - RNA, 21 nt, synthetic construct
  misc_feature 1..21: note = Synthetic
  source 1..21: mol_type = other RNA
tctgtcgccctacctcttttt

SEQ ID NO: 593 - RNA, 22 nt, synthetic construct
  misc_feature 1..22: note = Synthetic
  source 1..22: mol_type = other RNA
atctgtcgccctacctcttttt

SEQ ID NO: 594 - RNA, 23 nt, synthetic construct
  misc_feature 1..23: note = Synthetic
  source 1..23: mol_type = other RNA
gatctgtcgccctacctcttttt

SEQ ID NO: 595 - RNA, 24 nt, synthetic construct
  misc_feature 1..24: note = Synthetic
  source 1..24: mol_type = other RNA
agatctgtcgccctacctcttttt

SEQ ID NO: 596 - RNA, 20 nt, synthetic construct
  misc_feature 1..20: note = Synthetic
  source 1..20: mol_type = other RNA
tctgtcgccctacctctttt

SEQ ID NO: 597 - RNA, 21 nt, synthetic construct
  misc_feature 1..21: note = Synthetic
  source 1..21: mol_type = other RNA
atctgtcgccctacctctttt

SEQ ID NO: 598 - RNA, 22 nt, synthetic construct
  misc_feature 1..22: note = Synthetic
  source 1..22: mol_type = other RNA
gatctgtcgccctacctctttt

SEQ ID NO: 599 - RNA, 23 nt, synthetic construct
  misc_feature 1..23: note = Synthetic
  source 1..23: mol_type = other RNA
agatctgtcgccctacctctttt

SEQ ID NO: 600 - RNA, 20 nt, synthetic construct
  misc_feature 1..20: note = Synthetic
  source 1..20: mol_type = other RNA
atctgtcgccctacctcttt

SEQ ID NO: 601 - RNA, 21 nt, synthetic construct
  misc_feature 1..21: note = Synthetic
  source 1..21: mol_type = other RNA
gatctgtcgccctacctcttt

SEQ ID NO: 602 - RNA, 22 nt, synthetic construct
  misc_feature 1..22: note = Synthetic
  source 1..22: mol_type = other RNA
agatctgtcgccctacctcttt

SEQ ID NO: 603 - RNA, 20 nt, synthetic construct
  misc_feature 1..20: note = Synthetic
  source 1..20: mol_type = other RNA
gatctgtcgccctacctctt

SEQ ID NO: 604 - RNA, 21 nt, synthetic construct
  misc_feature 1..21: note = Synthetic
  source 1..21: mol_type = other RNA
agatctgtcgccctacctctt

SEQ ID NO: 605 - RNA, 20 nt, synthetic construct
  misc_feature 1..20: note = Synthetic
  source 1..20: mol_type = other RNA
agatctgtcgccctacctct

SEQ ID NO: 606 - RNA, 25 nt, synthetic construct
  misc_feature 1..25: note = Synthetic
  source 1..25: mol_type = other RNA
ctattagatctgtcgccctacctct

SEQ ID NO: 607 - RNA, 24 nt, synthetic construct
  misc_feature 1..24: note = Synthetic
  source 1..24: mol_type = other RNA
ctattagatctgtcgccctacctc

SEQ ID NO: 608 - RNA, 25 nt, synthetic construct
  misc_feature 1..25: note = Synthetic
  source 1..25: mol_type = other RNA
cctattagatctgtcgccctacctc

SEQ ID NO: 609 - RNA, 23 nt, synthetic construct
  misc_feature 1..23: note = Synthetic
  source 1..23: mol_type = other RNA
ctattagatctgtcgccctacct

SEQ ID NO: 610 - RNA, 24 nt, synthetic construct
  misc_feature 1..24: note = Synthetic
  source 1..24: mol_type = other RNA
cctattagatctgtcgccctacct

SEQ ID NO: 611 - RNA, 25 nt, synthetic construct
  misc_feature 1..25: note = Synthetic
  source 1..25: mol_type = other RNA
tcctattagatctgtcgccctacct

SEQ ID NO: 612 - RNA, 22 nt, synthetic construct
  misc_feature 1..22: note = Synthetic
  source 1..22: mol_type = other RNA
ctattagatctgtcgccctacc

SEQ ID NO: 613 - RNA, 23 nt, synthetic construct
  misc_feature 1..23: note = Synthetic
  source 1..23: mol_type = other RNA
cctattagatctgtcgccctacc

SEQ ID NO: 614 - RNA, 24 nt, synthetic construct
  misc_feature 1..24: note = Synthetic
  source 1..24: mol_type = other RNA
tcctattagatctgtcgccctacc

SEQ ID NO: 615 - RNA, 25 nt, synthetic construct
  misc_feature 1..25: note = Synthetic
  source 1..25: mol_type = other RNA
ttcctattagatctgtcgccctacc

SEQ ID NO: 616 - RNA, 21 nt, synthetic construct
  misc_feature 1..21: note = Synthetic
  source 1..21: mol_type = other RNA
ctattagatctgtcgccctac

SEQ ID NO: 617 - RNA, 22 nt, synthetic construct
  misc_feature 1..22: note = Synthetic
  source 1..22: mol_type = other RNA
cctattagatctgtcgccctac

SEQ ID NO: 618 - RNA, 23 nt, synthetic construct
  misc_feature 1..23: note = Synthetic
  source 1..23: mol_type = other RNA
tcctattagatctgtcgccctac

SEQ ID NO: 619 - RNA, 24 nt, synthetic construct
  misc_feature 1..24: note = Synthetic
  source 1..24: mol_type = other RNA
ttcctattagatctgtcgccctac

SEQ ID NO: 620 - RNA, 25 nt, synthetic construct
  misc_feature 1..25: note = Synthetic
  source 1..25: mol_type = other RNA
attcctattagatctgtcgccctac

SEQ ID NO: 621 - RNA, 22 nt, synthetic construct
  misc_feature 1..22: note = Synthetic
  source 1..22: mol_type = other RNA
tcctattagatctgtcgcccta

SEQ ID NO: 622 - RNA, 23 nt, synthetic construct
  misc_feature 1..23: note = Synthetic
  source 1..23: mol_type = other RNA
ttcctattagatctgtcgcccta

SEQ ID NO: 623 - RNA, 24 nt, synthetic construct
  misc_feature 1..24: note = Synthetic
  source 1..24: mol_type = other RNA
attcctattagatctgtcgcccta

SEQ ID NO: 624 - RNA, 21 nt, synthetic construct
  misc_feature 1..21: note = Synthetic
  source 1..21: mol_type = other RNA
tcctattagatctgtcgccct

SEQ ID NO: 625 - RNA, 22 nt, synthetic construct
  misc_feature 1..22: note = Synthetic
  source 1..22: mol_type = other RNA
ttcctattagatctgtcgccct

SEQ ID NO: 626 - RNA, 23 nt, synthetic construct
  misc_feature 1..23: note = Synthetic
  source 1..23: mol_type = other RNA
attcctattagatctgtcgccct

SEQ ID NO: 627 - RNA, 20 nt, synthetic construct
  misc_feature 1..20: note = Synthetic
  source 1..20: mol_type = other RNA
tcctattagatctgtcgccc

SEQ ID NO: 628 - RNA, 21 nt, synthetic construct
  misc_feature 1..21: note = Synthetic
  source 1..21: mol_type = other RNA
ttcctattagatctgtcgccc

SEQ ID NO: 629 - RNA, 22 nt, synthetic construct
  misc_feature 1..22: note = Synthetic
  source 1..22: mol_type = other RNA
attcctattagatctgtcgccc

SEQ ID NO: 630 - RNA, 21 nt, synthetic construct
  misc_feature 1..21: note = Synthetic
  source 1..21: mol_type = other RNA
ctttcaccctgcttataatct

SEQ ID NO: 631 - RNA, 22 nt, synthetic construct
  misc_feature 1..22: note = Synthetic
  source 1..22: mol_type = other RNA
cctttcaccctgcttataatct

SEQ ID NO: 632 - RNA, 23 nt, synthetic construct
  misc_feature 1..23: note = Synthetic
  source 1..23: mol_type = other RNA
gcctttcaccctgcttataatct

SEQ ID NO: 633 - RNA, 24 nt, synthetic construct
  misc_feature 1..24: note = Synthetic
  source 1..24: mol_type = other RNA
tgcctttcaccctgcttataatct

SEQ ID NO: 634 - RNA, 25 nt, synthetic construct
  misc_feature 1..25: note = Synthetic
  source 1..25: mol_type = other RNA
gtgcctttcaccctgcttataatct

SEQ ID NO: 635 - RNA, 20 nt, synthetic construct
  misc_feature 1..20: note = Synthetic
  source 1..20: mol_type = other RNA
ctttcaccctgcttataatc

SEQ ID NO: 636 - RNA, 21 nt, synthetic construct
  misc_feature 1..21: note = Synthetic
  source 1..21: mol_type = other RNA
cctttcaccctgcttataatc

SEQ ID NO: 637 - RNA, 22 nt, synthetic construct
  misc_feature 1..22: note = Synthetic
  source 1..22: mol_type = other RNA
gcctttcaccctgcttataatc

SEQ ID NO: 638 - RNA, 23 nt, synthetic construct
  misc_feature 1..23: note = Synthetic
  source 1..23: mol_type = other RNA
tgcctttcaccctgcttataatc

SEQ ID NO: 639 - RNA, 24 nt, synthetic construct
  misc_feature 1..24: note = Synthetic
  source 1..24: mol_type = other RNA
gtgcctttcaccctgcttataatc

SEQ ID NO: 640 - DNA, 25 bp, synthetic construct
  misc_feature 1..25: note = Synthetic
  source 1..25: mol_type = other DNA
accacatgcagttgtactggcaaag

SEQ ID NO: 641 - DNA, 24 bp, synthetic construct
  misc_feature 1..24: note = Synthetic
  source 1..24: mol_type = other DNA
taccacatgcagttgtactggcaa

SEQ ID NO: 642 - DNA, 25 bp, synthetic construct
  misc_feature 1..25: note = Synthetic
  source 1..25: mol_type = other DNA
ctaccacatgcagttgtactggcaa

SEQ ID NO: 643 - DNA, 22 bp, synthetic construct
  misc_feature 1..22: note = Synthetic
  source 1..22: mol_type = other DNA
accacatgcagttgtactggca

SEQ ID NO: 644 - DNA, 23 bp, synthetic construct
  misc_feature 1..23: note = Synthetic
  source 1..23: mol_type = other DNA
taccacatgcagttgtactggca

SEQ ID NO: 645 - DNA, 24 bp, synthetic construct
  misc_feature 1..24: note = Synthetic
  source 1..24: mol_type = other DNA
ctaccacatgcagttgtactggca

SEQ ID NO: 646 - DNA, 25 bp, synthetic construct
  misc_feature 1..25: note = Synthetic
  source 1..25: mol_type = other DNA
gctaccacatgcagttgtactggca

SEQ ID NO: 647 - DNA, 21 bp, synthetic construct
  misc_feature 1..21: note = Synthetic
  source 1..21: mol_type = other DNA
accacatgcagttgtactggc

SEQ ID NO: 648 - DNA, 22 bp, synthetic construct
  misc_feature 1..22: note = Synthetic
  source 1..22: mol_type = other DNA
taccacatgcagttgtactggc

SEQ ID NO: 649 - DNA, 23 bp, synthetic construct
  misc_feature 1..23: note = Synthetic
  source 1..23: mol_type = other DNA
ctaccacatgcagttgtactggc

SEQ ID NO: 650 - DNA, 24 bp, synthetic construct
  misc_feature 1..24: note = Synthetic
  source 1..24: mol_type = other DNA
gctaccacatgcagttgtactggc

SEQ ID NO: 651 - DNA, 25 bp, synthetic construct
  misc_feature 1..25: note = Synthetic
  source 1..25: mol_type = other DNA
tgctaccacatgcagttgtactggc

SEQ ID NO: 652 - DNA, 22 bp, synthetic construct
  misc_feature 1..22: note = Synthetic
  source 1..22: mol_type = other DNA
ctaccacatgcagttgtactgg

SEQ ID NO: 653 - DNA, 23 bp, synthetic construct
  misc_feature 1..23: note = Synthetic
  source 1..23: mol_type = other DNA
gctaccacatgcagttgtactgg

SEQ ID NO: 654 - DNA, 24 bp, synthetic construct
  misc_feature 1..24: note = Synthetic
  source 1..24: mol_type = other DNA
tgctaccacatgcagttgtactgg

SEQ ID NO: 655 - DNA, 22 bp, synthetic construct
  misc_feature 1..22: note = Synthetic
  source 1..22: mol_type = other DNA
gctaccacatgcagttgtactg

SEQ ID NO: 656 - DNA, 23 bp, synthetic construct
  misc_feature 1..23: note = Synthetic
  source 1..23: mol_type = other DNA
tgctaccacatgcagttgtactg

SEQ ID NO: 657 - DNA, 21 bp, synthetic construct
  misc_feature 1..21: note = Synthetic
  source 1..21: mol_type = other DNA
gctaccacatgcagttgtact

SEQ ID NO: 658 - DNA, 22 bp, synthetic construct
  misc_feature 1..22: note = Synthetic
  source 1..22: mol_type = other DNA
tgctaccacatgcagttgtact

SEQ ID NO: 659 - DNA, 22 bp, synthetic construct
  misc_feature 1..22: note = Synthetic
  source 1..22: mol_type = other DNA
gtgctaccacatgcagttgtac

SEQ ID NO: 660 - DNA, 23 bp, synthetic construct
  misc_feature 1..23: note = Synthetic
  source 1..23: mol_type = other DNA
tgtgctaccacatgcagttgtac

SEQ ID NO: 661 - DNA, 21 bp, synthetic construct
  misc_feature 1..21: note = Synthetic
  source 1..21: mol_type = other DNA
tgaagccccatgtctttttat

SEQ ID NO: 662 - DNA, 23 bp, synthetic construct
  misc_feature 1..23: note = Synthetic
  source 1..23: mol_type = other DNA
gccatcctggagttcctgtaaga

SEQ ID NO: 663 - DNA, 24 bp, synthetic construct
  misc_feature 1..24: note = Synthetic
  source 1..24: mol_type = other DNA
tgccatcctggagttcctgtaaga

SEQ ID NO: 664 - DNA, 25 bp, synthetic construct
  misc_feature 1..25: note = Synthetic
  source 1..25: mol_type = other DNA
atgccatcctggagttcctgtaaga

SEQ ID NO: 665 - DNA, 23 bp, synthetic construct
  misc_feature 1..23: note = Synthetic
  source 1..23: mol_type = other DNA
tgccatcctggagttcctgtaag

SEQ ID NO: 666 - DNA, 24 bp, synthetic construct
  misc_feature 1..24: note = Synthetic
  source 1..24: mol_type = other DNA
atgccatcctggagttcctgtaag

SEQ ID NO: 667 - DNA, 25 bp, synthetic construct
  misc_feature 1..25: note = Synthetic
  source 1..25: mol_type = other DNA
aatgccatcctggagttcctgtaag

SEQ ID NO: 668 - DNA, 20 bp, synthetic construct
  misc_feature 1..20: note = Synthetic
  source 1..20: mol_type = other DNA
gccatcctggagttcctgta

SEQ ID NO: 669 - DNA, 21 bp, synthetic construct
  misc_feature 1..21: note = Synthetic
  source 1..21: mol_type = other DNA
tgccatcctggagttcctgta

SEQ ID NO: 670 - DNA, 22 bp, synthetic construct
  misc_feature 1..22: note = Synthetic
  source 1..22: mol_type = other DNA
atgccatcctggagttcctgta

SEQ ID NO: 671 - DNA, 23 bp, synthetic construct
  misc_feature 1..23: note = Synthetic
  source 1..23: mol_type = other DNA
aatgccatcctggagttcctgta

SEQ ID NO: 672 - DNA, 25 bp, synthetic construct
  misc_feature 1..25: note = Synthetic
  source 1..25: mol_type = other DNA
ccaatgccatcctggagttcctgta

SEQ ID NO: 673 - DNA, 20 bp, synthetic construct
  misc_feature 1..20: note = Synthetic
  source 1..20: mol_type = other DNA
tgccatcctggagttcctgt

SEQ ID NO: 674 - DNA, 21 bp, synthetic construct
  misc_feature 1..21: note = Synthetic
  source 1..21: mol_type = other DNA
atgccatcctggagttcctgt

SEQ ID NO: 675 - DNA, 22 bp, synthetic construct
  misc_feature 1..22: note = Synthetic
  source 1..22: mol_type = other DNA
aatgccatcctggagttcctgt

SEQ ID NO: 676 - DNA, 24 bp, synthetic construct
  misc_feature 1..24: note = Synthetic
  source 1..24: mol_type = other DNA
ccaatgccatcctggagttcctgt

SEQ ID NO: 677 - DNA, 25 bp, synthetic construct
  misc_feature 1..25: note = Synthetic
  source 1..25: mol_type = other DNA
cccaatgccatcctggagttcctgt

SEQ ID NO: 678 - DNA, 20 bp, synthetic construct
  misc_feature 1..20: note = Synthetic
  source 1..20: mol_type = other DNA
atgccatcctggagttcctg

SEQ ID NO: 679 - DNA, 21 bp, synthetic construct
  misc_feature 1..21: note = Synthetic
  source 1..21: mol_type = other DNA
aatgccatcctggagttcctg

SEQ ID NO: 680 - DNA, 23 bp, synthetic construct
  misc_feature 1..23: note = Synthetic
  source 1..23: mol_type = other DNA
ccaatgccatcctggagttcctg

SEQ ID NO: 681 - DNA, 24 bp, synthetic construct
  misc_feature 1..24: note = Synthetic
  source 1..24: mol_type = other DNA
cccaatgccatcctggagttcctg

SEQ ID NO: 682 - DNA, 25 bp, synthetic construct
  misc_feature 1..25: note = Synthetic
  source 1..25: mol_type = other DNA
gcccaatgccatcctggagttcctg

SEQ ID NO: 683 - DNA, 20 bp, synthetic construct
  misc_feature 1..20: note = Synthetic
  source 1..20: mol_type = other DNA
aatgccatcctggagttcct

SEQ ID NO: 684 - DNA, 22 bp, synthetic construct
  misc_feature 1..22: note = Synthetic
  source 1..22: mol_type = other DNA
ccaatgccatcctggagttcct

SEQ ID NO: 685 - DNA, 23 bp, synthetic construct
  misc_feature 1..23: note = Synthetic
  source 1..23: mol_type = other DNA
cccaatgccatcctggagttcct

SEQ ID NO: 686 - DNA, 24 bp, synthetic construct
  misc_feature 1..24: note = Synthetic
  source 1..24: mol_type = other DNA
gcccaatgccatcctggagttcct

SEQ ID NO: 687 - DNA, 25 bp, synthetic construct
  misc_feature 1..25: note = Synthetic
  source 1..25: mol_type = other DNA
tgcccaatgccatcctggagttcct

SEQ ID NO: 688 - DNA, 21 bp, synthetic construct
  misc_feature 1..21: note = Synthetic
  source 1..21: mol_type = other DNA
ccaatgccatcctggagttcc

SEQ ID NO: 689 - DNA, 22 bp, synthetic construct
  misc_feature 1..22: note = Synthetic
  source 1..22: mol_type = other DNA
cccaatgccatcctggagttcc

SEQ ID NO: 690 - DNA, 24 bp, synthetic construct
  misc_feature 1..24: note = Synthetic
  source 1..24: mol_type = other DNA
tgcccaatgccatcctggagttcc

SEQ ID NO: 691 - DNA, 25 bp, synthetic construct
  misc_feature 1..25: note = Synthetic
  source 1..25: mol_type = other DNA
ctgcccaatgccatcctggagttcc

SEQ ID NO: 692 - DNA, 20 bp, synthetic construct
  misc_feature 1..20: note = Synthetic
  source 1..20: mol_type = other DNA
ccaatgccatcctggagttc

SEQ ID NO: 693 - DNA, 21 bp, synthetic construct
  misc_feature 1..21: note = Synthetic
  source 1..21: mol_type = other DNA
cccaatgccatcctggagttc

SEQ ID NO: 694 - DNA, 22 bp, synthetic construct
  misc_feature 1..22: note = Synthetic
  source 1..22: mol_type = other DNA
gcccaatgccatcctggagttc

SEQ ID NO: 695 - DNA, 23 bp, synthetic construct
  misc_feature 1..23: note = Synthetic
  source 1..23: mol_type = other DNA
tgcccaatgccatcctggagttc

SEQ ID NO: 696 - DNA, 24 bp, synthetic construct
  misc_feature 1..24: note = Synthetic
  source 1..24: mol_type = other DNA
ctgcccaatgccatcctggagttc

SEQ ID NO: 697 - DNA, 25 bp, synthetic construct
  misc_feature 1..25: note = Synthetic
  source 1..25: mol_type = other DNA
gctgcccaatgccatcctggagttc

SEQ ID NO: 698 - DNA, 20 bp, synthetic construct
  misc_feature 1..20: note = Synthetic
  source 1..20: mol_type = other DNA
cccaatgccatcctggagtt

SEQ ID NO: 699 - DNA, 21 bp, synthetic construct
  misc_feature 1..21: note = Synthetic
  source 1..21: mol_type = other DNA
gcccaatgccatcctggagtt

SEQ ID NO: 700 - DNA, 22 bp, synthetic construct
  misc_feature 1..22: note = Synthetic
  source 1..22: mol_type = other DNA
tgcccaatgccatcctggagtt

SEQ ID NO: 701 - DNA, 23 bp, synthetic construct
  misc_feature 1..23: note = Synthetic
  source 1..23: mol_type = other DNA
ctgcccaatgccatcctggagtt

SEQ ID NO: 702 - DNA, 24 bp, synthetic construct
  misc_feature 1..24: note = Synthetic
  source 1..24: mol_type = other DNA
gctgcccaatgccatcctggagtt

SEQ ID NO: 703 - DNA, 20 bp, synthetic construct
  misc_feature 1..20: note = Synthetic
  source 1..20: mol_type = other DNA
gcccaatgccatcctggagt

SEQ ID NO: 704 - DNA, 21 bp, synthetic construct
  misc_feature 1..21: note = Synthetic
  source 1..21: mol_type = other DNA
tgcccaatgccatcctggagt

SEQ ID NO: 705 - DNA, 22 bp, synthetic construct
  misc_feature 1..22: note = Synthetic
  source 1..22: mol_type = other DNA
ctgcccaatgccatcctggagt

SEQ ID NO: 706 - DNA, 20 bp, synthetic construct
  misc_feature 1..20: note = Synthetic
  source 1..20: mol_type = other DNA
tgcccaatgccatcctggag

SEQ ID NO: 707 - DNA, 24 bp, synthetic construct
  misc_feature 1..24: note = Synthetic
  source 1..24: mol_type = other DNA
tccccagttgcattcaatgttctg

SEQ ID NO: 708 - DNA, 23 bp, synthetic construct
  misc_feature 1..23: note = Synthetic
  source 1..23: mol_type = other DNA
tccccagttgcattcaatgttct

SEQ ID NO: 709 - DNA, 25 bp, synthetic construct
  misc_feature 1..25: note = Synthetic
  source 1..25: mol_type = other DNA
cttccccagttgcattcaatgttct

SEQ ID NO: 710 - DNA, 25 bp, synthetic construct
  misc_feature 1..25: note = Synthetic
  source 1..25: mol_type = other DNA
tcttccccagttgcattcaatgttc

SEQ ID NO: 711 - DNA, 25 bp, synthetic construct
  misc_feature 1..25: note = Synthetic
  source 1..25: mol_type = other DNA
atttcttccccagttgcattcaatg

SEQ ID NO: 712 - DNA, 24 bp, synthetic construct
  misc_feature 1..24: note = Synthetic
  source 1..24: mol_type = other DNA
atttcttccccagttgcattcaat

SEQ ID NO: 713 - DNA, 25 bp, synthetic construct
  misc_feature 1..25: note = Synthetic
  source 1..25: mol_type = other DNA
tatttcttccccagttgcattcaat

SEQ ID NO: 714 - DNA, 23 bp, synthetic construct
  misc_feature 1..23: note = Synthetic
  source 1..23: mol_type = other DNA
atttcttccccagttgcattcaa

SEQ ID NO: 715 - DNA, 24 bp, synthetic construct
  misc_feature 1..24: note = Synthetic
  source 1..24: mol_type = other DNA
tatttcttccccagttgcattcaa

SEQ ID NO: 716 - DNA, 25 bp, synthetic construct
  misc_feature 1..25: note = Synthetic
  source 1..25: mol_type = other DNA
ttatttcttccccagttgcattcaa

SEQ ID NO: 717 - DNA, 20 bp, synthetic construct
  misc_feature 1..20: note = Synthetic
  source 1..20: mol_type = other DNA
ttcttccccagttgcattca

SEQ ID NO: 718 - DNA, 22 bp, synthetic construct
  misc_feature 1..22: note = Synthetic
  source 1..22: mol_type = other DNA
atttcttccccagttgcattca

SEQ ID NO: 719 - DNA, 23 bp, synthetic construct
  misc_feature 1..23: note = Synthetic
  source 1..23: mol_type = other DNA
tatttcttccccagttgcattca

SEQ ID NO: 720 - DNA, 24 bp, synthetic construct
  misc_feature 1..24: note = Synthetic
  source 1..24: mol_type = other DNA
ttatttcttccccagttgcattca

SEQ ID NO: 721 - DNA, 21 bp, synthetic construct
  misc_feature 1..21: note = Synthetic
  source 1..21: mol_type = other DNA
atttcttccccagttgcattc

SEQ ID NO: 722 - DNA, 22 bp, synthetic construct
  misc_feature 1..22: note = Synthetic
  source 1..22: mol_type = other DNA
tatttcttccccagttgcattc

SEQ ID NO: 723 - DNA, 23 bp, synthetic construct
  misc_feature 1..23: note = Synthetic
  source 1..23: mol_type = other DNA
ttatttcttccccagttgcattc

SEQ ID NO: 724 - DNA, 21 bp, synthetic construct
  misc_feature 1..21: note = Synthetic
  source 1..21: mol_type = other DNA
tatttcttccccagttgcatt

SEQ ID NO: 725 - DNA, 20 bp, synthetic construct
  misc_feature 1..20: note = Synthetic
  source 1..20: mol_type = other DNA
tatttcttccccagttgcat

SEQ ID NO: 726 - DNA, 21 bp, synthetic construct
  misc_feature 1..21: note = Synthetic
  source 1..21: mol_type = other DNA
ttatttcttccccagttgcat

SEQ ID NO: 727 - DNA, 22 bp, synthetic construct
  misc_feature 1..22: note = Synthetic
  source 1..22: mol_type = other DNA
attatttcttccccagttgcat

SEQ ID NO: 728 - DNA, 24 bp, synthetic construct
  misc_feature 1..24: note = Synthetic
  source 1..24: mol_type = other DNA
tctgtttttgaggattgctgaatt

SEQ ID NO: 729 - DNA, 25 bp, synthetic construct
  misc_feature 1..25: note = Synthetic
  source 1..25: mol_type = other DNA
atctgtttttgaggattgctgaatt

SEQ ID NO: 730 - DNA, 22 bp, synthetic construct
  misc_feature 1..22: note = Synthetic
  source 1..22: mol_type = other DNA
ctgtttttgaggattgctgaat

SEQ ID NO: 731 - DNA, 23 bp, synthetic construct
  misc_feature 1..23: note = Synthetic
  source 1..23: mol_type = other DNA
tctgtttttgaggattgctgaat

SEQ ID NO: 732 - DNA, 24 bp, synthetic construct
  misc_feature 1..24: note = Synthetic
  source 1..24: mol_type = other DNA
atctgtttttgaggattgctgaat

SEQ ID NO: 733 - DNA, 25 bp, synthetic construct
  misc_feature 1..25: note = Synthetic
  source 1..25: mol_type = other DNA
catctgtttttgaggattgctgaat

SEQ ID NO: 734 - DNA, 22 bp, synthetic construct
  misc_feature 1..22: note = Synthetic
  source 1..22: mol_type = other DNA
tctgtttttgaggattgctgaa

SEQ ID NO: 735 - DNA, 23 bp, synthetic construct
  misc_feature 1..23: note = Synthetic
  source 1..23: mol_type = other DNA
atctgtttttgaggattgctgaa

SEQ ID NO: 736 - DNA, 24 bp, synthetic construct
  misc_feature 1..24: note = Synthetic
  source 1..24: mol_type = other DNA
catctgtttttgaggattgctgaa

SEQ ID NO: 737 - DNA, 20 bp, synthetic construct
  misc_feature 1..20: note = Synthetic
  source 1..20: mol_type = other DNA
ctgtttttgaggattgctga

SEQ ID NO: 738 - DNA, 21 bp, synthetic construct
  misc_feature 1..21: note = Synthetic
  source 1..21: mol_type = other DNA
tctgtttttgaggattgctga

SEQ ID NO: 739 - DNA, 22 bp, synthetic construct
  misc_feature 1..22: note = Synthetic
  source 1..22: mol_type = other DNA
atctgtttttgaggattgctga

SEQ ID NO: 740 - DNA, 23 bp, synthetic construct
  misc_feature 1..23: note = Synthetic
  source 1..23: mol_type = other DNA
catctgtttttgaggattgctga

SEQ ID NO: 741 - DNA, 20 bp, synthetic construct
  misc_feature 1..20: note = Synthetic
  source 1..20: mol_type = other DNA
tctgtttttgaggattgctg

SEQ ID NO: 742 - DNA, 21 bp, synthetic construct
  misc_feature 1..21: note = Synthetic
  source 1..21: mol_type = other DNA
atctgtttttgaggattgctg

SEQ ID NO: 743 - DNA, 22 bp, synthetic construct
  misc_feature 1..22: note = Synthetic
  source 1..22: mol_type = other DNA
catctgtttttgaggattgctg

SEQ ID NO: 744 - DNA, 20 bp, synthetic construct
  misc_feature 1..20: note = Synthetic
  source 1..20: mol_type = other DNA
atctgtttttgaggattgct

SEQ ID NO: 745 - DNA, 21 bp, synthetic construct
  misc_feature 1..21: note = Synthetic
  source 1..21: mol_type = other DNA
catctgtttttgaggattgct

SEQ ID NO: 746 - DNA, 21 bp, synthetic construct
  misc_feature 1..21: note = Synthetic
  source 1..21: mol_type = other DNA
gcatctgtttttgaggattgc

SEQ ID NO: 747 - DNA, 22 bp, synthetic construct
  misc_feature 1..22: note = Synthetic
  source 1..22: mol_type = other DNA
ggcatctgtttttgaggattgc

SEQ ID NO: 748 - DNA, 23 bp, synthetic construct
  misc_feature 1..23: note = Synthetic
  source 1..23: mol_type = other DNA
tggcatctgtttttgaggattgc

SEQ ID NO: 749 - DNA, 21 bp, synthetic construct
  misc_feature 1..21: note = Synthetic
  source 1..21: mol_type = other DNA
ggcatctgtttttgaggattg

SEQ ID NO: 750 - DNA, 22 bp, synthetic construct
  misc_feature 1..22: note = Synthetic
  source 1..22: mol_type = other DNA
tggcatctgtttttgaggattg

SEQ ID NO: 751 - DNA, 25 bp, synthetic construct
  misc_feature 1..25: note = Synthetic
  source 1..25: mol_type = other DNA
tactggcatctgtttttgaggattg

SEQ ID NO: 752 - DNA, 20 bp, synthetic construct
  misc_feature 1..20: note = Synthetic
  source 1..20: mol_type = other DNA
ggcatctgtttttgaggatt

SEQ ID NO: 753 - DNA, 21 bp, synthetic construct
  misc_feature 1..21: note = Synthetic
  source 1..21: mol_type = other DNA
tggcatctgtttttgaggatt

SEQ ID NO: 754 - DNA, 24 bp, synthetic construct
  misc_feature 1..24: note = Synthetic
  source 1..24: mol_type = other DNA
tactggcatctgtttttgaggatt

SEQ ID NO: 755 - DNA, 25 bp, synthetic construct
  misc_feature 1..25: note = Synthetic
  source 1..25: mol_type = other DNA
atactggcatctgtttttgaggatt

SEQ ID NO: 756 - DNA, 20 bp, synthetic construct
  misc_feature 1..20: note = Synthetic
  source 1..20: mol_type = other DNA
tggcatctgtttttgaggat

SEQ ID NO: 757 - DNA, 23 bp, synthetic construct
  misc_feature 1..23: note = Synthetic
  source 1..23: mol_type = other DNA
tactggcatctgtttttgaggat

SEQ ID NO: 758 - DNA, 24 bp, synthetic construct
  misc_feature 1..24: note = Synthetic
  source 1..24: mol_type = other DNA
atactggcatctgtttttgaggat

SEQ ID NO: 759 - DNA, 25 bp, synthetic construct
  misc_feature 1..25: note = Synthetic
  source 1..25: mol_type = other DNA
aatactggcatctgtttttgaggat

SEQ ID NO: 760 - DNA, 22 bp, synthetic construct
  misc_feature 1..22: note = Synthetic
  source 1..22: mol_type = other DNA
tactggcatctgtttttgagga

SEQ ID NO: 761 - DNA, 23 bp, synthetic construct
  misc_feature 1..23: note = Synthetic
  source 1..23: mol_type = other DNA
atactggcatctgtttttgagga

SEQ ID NO: 762 - DNA, 24 bp, synthetic construct
  misc_feature 1..24: note = Synthetic
  source 1..24: mol_type = other DNA
aatactggcatctgtttttgagga

SEQ ID NO: 763 - DNA, 21 bp, synthetic construct
  misc_feature 1..21: note = Synthetic
  source 1..21: mol_type = other DNA
tactggcatctgtttttgagg

SEQ ID NO: 764 - DNA, 22 bp, synthetic construct
  misc_feature 1..22: note = Synthetic
  source 1..22: mol_type = other DNA
atactggcatctgtttttgagg

SEQ ID NO: 765 - DNA, 23 bp, synthetic construct
  misc_feature 1..23: note = Synthetic
  source 1..23: mol_type = other DNA
aatactggcatctgtttttgagg

SEQ ID NO: 766 - DNA, 25 bp, synthetic construct
  misc_feature 1..25: note = Synthetic
  source 1..25: mol_type = other DNA
agaatactggcatctgtttttgagg

SEQ ID NO: 767 - DNA, 20 bp, synthetic construct
  misc_feature 1..20: note = Synthetic
  source 1..20: mol_type = other DNA
tactggcatctgtttttgag

SEQ ID NO: 768 - DNA, 21 bp, synthetic construct
  misc_feature 1..21: note = Synthetic
  source 1..21: mol_type = other DNA
atactggcatctgtttttgag

SEQ ID NO: 769 - DNA, 22 bp, synthetic construct
  misc_feature 1..22: note = Synthetic
  source 1..22: mol_type = other DNA
aatactggcatctgtttttgag

SEQ ID NO: 770 - DNA, 24 bp, synthetic construct
  misc_feature 1..24: note = Synthetic
  source 1..24: mol_type = other DNA
agaatactggcatctgtttttgag

SEQ ID NO: 771 - DNA, 25 bp, synthetic construct
  misc_feature 1..25: note = Synthetic
  source 1..25: mol_type = other DNA
tagaatactggcatctgtttttgag

SEQ ID NO: 772 - DNA, 20 bp, synthetic construct
  misc_feature 1..20: note = Synthetic
  source 1..20: mol_type = other DNA
atactggcatctgtttttga

SEQ ID NO: 773 - DNA, 21 bp, synthetic construct
  misc_feature 1..21: note = Synthetic
  source 1..21: mol_type = other DNA
aatactggcatctgtttttga

SEQ ID NO: 774 - DNA, 23 bp, synthetic construct
  misc_feature 1..23: note = Synthetic
  source 1..23: mol_type = other DNA
agaatactggcatctgtttttga

SEQ ID NO: 775 - DNA, 24 bp, synthetic construct
  misc_feature 1..24: note = Synthetic
  source 1..24: mol_type = other DNA
tagaatactggcatctgtttttga

SEQ ID NO: 776 - DNA, 25 bp, synthetic construct
  misc_feature 1..25: note = Synthetic
  source 1..25: mol_type = other DNA
gtagaatactggcatctgtttttga

SEQ ID NO: 777 - DNA, 22 bp, synthetic construct
  misc_feature 1..22: note = Synthetic
  source 1..22: mol_type = other DNA
agaatactggcatctgtttttg

SEQ ID NO: 778 - DNA, 23 bp, synthetic construct
  misc_feature 1..23: note = Synthetic
  source 1..23: mol_type = other DNA
tagaatactggcatctgtttttg

SEQ ID NO: 779 - DNA, 24 bp, synthetic construct
  misc_feature 1..24: note = Synthetic
  source 1..24: mol_type = other DNA
gtagaatactggcatctgtttttg

SEQ ID NO: 780 - DNA, 25 bp, synthetic construct
  misc_feature 1..25: note = Synthetic
  source 1..25: mol_type = other DNA
tgtagaatactggcatctgtttttg

SEQ ID NO: 781 - DNA, 23 bp, synthetic construct
  misc_feature 1..23: note = Synthetic
  source 1..23: mol_type = other DNA
gtagaatactggcatctgttttt

SEQ ID NO: 782 - DNA, 24 bp, synthetic construct
  misc_feature 1..24: note = Synthetic
  source 1..24: mol_type = other DNA
tgtagaatactggcatctgttttt

SEQ ID NO: 783 - DNA, 25 bp, synthetic construct
  misc_feature 1..25: note = Synthetic
  source 1..25: mol_type = other DNA
ctgtagaatactggcatctgttttt

SEQ ID NO: 784 - DNA, 22 bp, synthetic construct
  misc_feature 1..22: note = Synthetic
  source 1..22: mol_type = other DNA
gtagaatactggcatctgtttt

SEQ ID NO: 785 - DNA, 23 bp, synthetic construct
  misc_feature 1..23: note = Synthetic
  source 1..23: mol_type = other DNA
tgtagaatactggcatctgtttt

SEQ ID NO: 786 - DNA, 24 bp, synthetic construct
  misc_feature 1..24: note = Synthetic
  source 1..24: mol_type = other DNA
ctgtagaatactggcatctgtttt

SEQ ID NO: 787 - DNA, 25 bp, synthetic construct
  misc_feature 1..25: note = Synthetic
  source 1..25: mol_type = other DNA
cctgtagaatactggcatctgtttt

SEQ ID NO: 788 - DNA, 21 bp, synthetic construct
  misc_feature 1..21: note = Synthetic
  source 1..21: mol_type = other DNA
gtagaatactggcatctgttt

SEQ ID NO: 789 - DNA, 22 bp, synthetic construct
  misc_feature 1..22: note = Synthetic
  source 1..22: mol_type = other DNA
tgtagaatactggcatctgttt

SEQ ID NO: 790 - DNA, 23 bp, synthetic construct
  misc_feature 1..23: note = Synthetic
  source 1..23: mol_type = other DNA
ctgtagaatactggcatctgttt

SEQ ID NO: 791 - DNA, 24 bp, synthetic construct
  misc_feature 1..24: note = Synthetic
  source 1..24: mol_type = other DNA
cctgtagaatactggcatctgttt

SEQ ID NO: 792 - DNA, 25 bp, synthetic construct
  misc_feature 1..25: note = Synthetic
  source 1..25: mol_type = other DNA
tcctgtagaatactggcatctgttt

SEQ ID NO: 793 - DNA, 20 bp, synthetic construct
  misc_feature 1..20: note = Synthetic
  source 1..20: mol_type = other DNA
gtagaatactggcatctgtt

SEQ ID NO: 794 - DNA, 21 bp, synthetic construct
  misc_feature 1..21: note = Synthetic
  source 1..21: mol_type = other DNA
tgtagaatactggcatctgtt

SEQ ID NO: 795 - DNA, 22 bp, synthetic construct
  misc_feature 1..22: note = Synthetic
  source 1..22: mol_type = other DNA
ctgtagaatactggcatctgtt

SEQ ID NO: 796 - DNA, 23 bp, synthetic construct
  misc_feature 1..23: note = Synthetic
  source 1..23: mol_type = other DNA
cctgtagaatactggcatctgtt

SEQ ID NO: 797 - DNA, 24 bp, synthetic construct
  misc_feature 1..24: note = Synthetic
  source 1..24: mol_type = other DNA
tcctgtagaatactggcatctgtt

SEQ ID NO: 798 - DNA, 25 bp, synthetic construct
  misc_feature 1..25: note = Synthetic
  source 1..25: mol_type = other DNA
ttcctgtagaatactggcatctgtt

SEQ ID NO: 799 - DNA, 20 bp, synthetic construct
  misc_feature 1..20: note = Synthetic
  source 1..20: mol_type = other DNA
tgtagaatactggcatctgt

SEQ ID NO: 800 - DNA, 21 bp, synthetic construct
  misc_feature 1..21: note = Synthetic
  source 1..21: mol_type = other DNA
ctgtagaatactggcatctgt

SEQ ID NO: 801 - DNA, 22 bp, synthetic construct
  misc_feature 1..22: note = Synthetic
  source 1..22: mol_type = other DNA
cctgtagaatactggcatctgt

SEQ ID NO: 802 - DNA, 23 bp, synthetic construct
  misc_feature 1..23: note = Synthetic
  source 1..23: mol_type = other DNA
tcctgtagaatactggcatctgt

SEQ ID NO: 803 - DNA, 24 bp, synthetic construct
  misc_feature 1..24: note = Synthetic
  source 1..24: mol_type = other DNA
ttcctgtagaatactggcatctgt

SEQ ID NO: 804 - DNA, 22 bp, synthetic construct
  misc_feature 1..22: note = Synthetic
  source 1..22: mol_type = other DNA
tcctgtagaatactggcatctg

SEQ ID NO: 805 - DNA, 23 bp, synthetic construct
  misc_feature 1..23: note = Synthetic
  source 1..23: mol_type = other DNA
ttcctgtagaatactggcatctg

SEQ ID NO: 806 - DNA, 25 bp, synthetic construct
  misc_feature 1..25: note = Synthetic
  source 1..25: mol_type = other DNA
ttttcctgtagaatactggcatctg

SEQ ID NO: 807 - DNA, 22 bp, synthetic construct
  misc_feature 1..22: note = Synthetic
  source 1..22: mol_type = other DNA
ttcctgtagaatactggcatct

SEQ ID NO: 808 - DNA, 24 bp, synthetic construct
  misc_feature 1..24: note = Synthetic
  source 1..24: mol_type = other DNA
ttttcctgtagaatactggcatct

SEQ ID NO: 809 - DNA, 25 bp, synthetic construct
  misc_feature 1..25: note = Synthetic
  source 1..25: mol_type = other DNA
tttttcctgtagaatactggcatct

SEQ ID NO: 810 - DNA, 23 bp, synthetic construct
  misc_feature 1..23: note = Synthetic
  source 1..23: mol_type = other DNA
ttttcctgtagaatactggcatc

SEQ ID NO: 811 - DNA, 24 bp, synthetic construct
  misc_feature 1..24: note = Synthetic
  source 1..24: mol_type = other DNA
tttttcctgtagaatactggcatc

SEQ ID NO: 812 - DNA, 25 bp, synthetic construct
  misc_feature 1..25: note = Synthetic
  source 1..25: mol_type = other DNA
atttttcctgtagaatactggcatc

SEQ ID NO: 813 - DNA, 23 bp, synthetic construct
  misc_feature 1..23: note = Synthetic
  source 1..23: mol_type = other DNA
tgtcgccctacctcttttttctg

SEQ ID NO: 814 - DNA, 24 bp, synthetic construct
  misc_feature 1..24: note = Synthetic
  source 1..24: mol_type = other DNA
ctgtcgccctacctcttttttctg

SEQ ID NO: 815 - DNA, 25 bp, synthetic construct
  misc_feature 1..25: note = Synthetic
  source 1..25: mol_type = other DNA
tctgtcgccctacctcttttttctg

SEQ ID NO: 816 - DNA, 22 bp, synthetic construct
  misc_feature 1..22: note = Synthetic
  source 1..22: mol_type = other DNA
tgtcgccctacctcttttttct

SEQ ID NO: 817 - DNA, 23 bp, synthetic construct
  misc_feature 1..23: note = Synthetic
  source 1..23: mol_type = other DNA
ctgtcgccctacctcttttttct

SEQ ID NO: 818 - DNA, 24 bp, synthetic construct
  misc_feature 1..24: note = Synthetic
  source 1..24: mol_type = other DNA
tctgtcgccctacctcttttttct

SEQ ID NO: 819 - DNA, 25 bp, synthetic construct
  misc_feature 1..25: note = Synthetic
  source 1..25: mol_type = other DNA
atctgtcgccctacctcttttttct

SEQ ID NO: 820 - DNA, 21 bp, synthetic construct
  misc_feature 1..21: note = Synthetic
  source 1..21: mol_type = other DNA
tgtcgccctacctcttttttc

SEQ ID NO: 821 - DNA, 22 bp, synthetic construct
  misc_feature 1..22: note = Synthetic
  source 1..22: mol_type = other DNA
ctgtcgccctacctcttttttc

SEQ ID NO: 822 - DNA, 23 bp, synthetic construct
  misc_feature 1..23: note = Synthetic
  source 1..23: mol_type = other DNA
tctgtcgccctacctcttttttc

SEQ ID NO: 823 - DNA, 24 bp, synthetic construct
  misc_feature 1..24: note = Synthetic
  source 1..24: mol_type = other DNA
atctgtcgccctacctcttttttc

SEQ ID NO: 824 - DNA, 25 bp, synthetic construct
  misc_feature 1..25: note = Synthetic
  source 1..25: mol_type = other DNA
gatctgtcgccctacctcttttttc

SEQ ID NO: 825 - DNA, 20 bp, synthetic construct
  misc_feature 1..20: note = Synthetic
  source 1..20: mol_type = other DNA
tgtcgccctacctctttttt

SEQ ID NO: 826 - DNA, 21 bp, synthetic construct
  misc_feature 1..21: note = Synthetic
  source 1..21: mol_type = other DNA
ctgtcgccctacctctttttt

SEQ ID NO: 827 - DNA, 22 bp, synthetic construct
  misc_feature 1..22: note = Synthetic
  source 1..22: mol_type = other DNA
tctgtcgccctacctctttttt

SEQ ID NO: 828 - DNA, 23 bp, synthetic construct
  misc_feature 1..23: note = Synthetic
  source 1..23: mol_type = other DNA
atctgtcgccctacctctttttt

SEQ ID NO: 829 - DNA, 24 bp, synthetic construct
  misc_feature 1..24: note = Synthetic
  source 1..24: mol_type = other DNA
gatctgtcgccctacctctttttt

SEQ ID NO: 830 - DNA, 25 bp, synthetic construct
  misc_feature 1..25: note = Synthetic
  source 1..25: mol_type = other DNA
agatctgtcgccctacctctttttt

SEQ ID NO: 831 - DNA, 20 bp, synthetic construct
  misc_feature 1..20: note = Synthetic
  source 1..20: mol_type = other DNA
ctgtcgccctacctcttttt

SEQ ID NO: 832 - DNA, 21 bp, synthetic construct
  misc_feature 1..21: note = Synthetic
  source 1..21: mol_type = other DNA
tctgtcgccctacctcttttt

SEQ ID NO: 833 - DNA, 22 bp, synthetic construct
  misc_feature 1..22: note = Synthetic
  source 1..22: mol_type = other DNA
atctgtcgccctacctcttttt

SEQ ID NO: 834 - DNA, 23 bp, synthetic construct
  misc_feature 1..23: note = Synthetic
  source 1..23: mol_type = other DNA
gatctgtcgccctacctcttttt

SEQ ID NO: 835 - DNA, 24 bp, synthetic construct
  misc_feature 1..24: note = Synthetic
  source 1..24: mol_type = other DNA
agatctgtcgccctacctcttttt

SEQ ID NO: 836 - DNA, 20 bp, synthetic construct
  misc_feature 1..20: note = Synthetic
  source 1..20: mol_type = other DNA
tctgtcgccctacctctttt

SEQ ID NO: 837 - DNA, 21 bp, synthetic construct
  misc_feature 1..21: note = Synthetic
  source 1..21: mol_type = other DNA
atctgtcgccctacctctttt

SEQ ID NO: 838 - DNA, 22 bp, synthetic construct
  misc_feature 1..22: note = Synthetic
  source 1..22: mol_type = other DNA
gatctgtcgccctacctctttt

SEQ ID NO: 839 - DNA, 23 bp, synthetic construct
  misc_feature 1..23: note = Synthetic
  source 1..23: mol_type = other DNA
agatctgtcgccctacctctttt

SEQ ID NO: 840 - DNA, 20 bp, synthetic construct
  misc_feature 1..20: note = Synthetic
  source 1..20: mol_type = other DNA
atctgtcgccctacctcttt

SEQ ID NO: 841 - DNA, 21 bp, synthetic construct
  misc_feature 1..21: note = Synthetic
  source 1..21: mol_type = other DNA
gatctgtcgccctacctcttt

SEQ ID NO: 842 - DNA, 22 bp, synthetic construct
  misc_feature 1..22: note = Synthetic
  source 1..22: mol_type = other DNA
agatctgtcgccctacctcttt

SEQ ID NO: 843 - DNA, 20 bp, synthetic construct
  misc_feature 1..20: note = Synthetic
  source 1..20: mol_type = other DNA
gatctgtcgccctacctctt

SEQ ID NO: 844 - DNA, 21 bp, synthetic construct
  misc_feature 1..21: note = Synthetic
  source 1..21: mol_type = other DNA
agatctgtcgccctacctctt

SEQ ID NO: 845 - DNA, 20 bp, synthetic construct
  misc_feature 1..20: note = Synthetic
  source 1..20: mol_type = other DNA
agatctgtcgccctacctct

SEQ ID NO: 846 - DNA, 25 bp, synthetic construct
  misc_feature 1..25: note = Synthetic
  source 1..25: mol_type = other DNA
ctattagatctgtcgccctacctct

SEQ ID NO: 847 - DNA, 24 bp, synthetic construct
  misc_feature 1..24: note = Synthetic
  source 1..24: mol_type = other DNA
ctattagatctgtcgccctacctc

SEQ ID NO: 848 - DNA, 25 bp, synthetic construct
  misc_feature 1..25: note = Synthetic
  source 1..25: mol_type = other DNA
cctattagatctgtcgccctacctc

SEQ ID NO: 849 - DNA, 23 bp, synthetic construct
  misc_feature 1..23: note = Synthetic
  source 1..23: mol_type = other DNA
ctattagatctgtcgccctacct

SEQ ID NO: 850 - DNA, 24 bp, synthetic construct
  misc_feature 1..24: note = Synthetic
  source 1..24: mol_type = other DNA
cctattagatctgtcgccctacct

SEQ ID NO: 851 - DNA, 25 bp, synthetic construct
  misc_feature 1..25: note = Synthetic
  source 1..25: mol_type = other DNA
tcctattagatctgtcgccctacct

SEQ ID NO: 852 - DNA, 22 bp, synthetic construct
  misc_feature 1..22: note = Synthetic
  source 1..22: mol_type = other DNA
ctattagatctgtcgccctacc

SEQ ID NO: 853 - DNA, 23 bp, synthetic construct
  misc_feature 1..23: note = Synthetic
  source 1..23: mol_type = other DNA
cctattagatctgtcgccctacc

SEQ ID NO: 854 - DNA, 24 bp, synthetic construct
  misc_feature 1..24: note = Synthetic
  source 1..24: mol_type = other DNA
tcctattagatctgtcgccctacc

SEQ ID NO: 855 - DNA, 25 bp, synthetic construct
  misc_feature 1..25: note = Synthetic
  source 1..25: mol_type = other DNA
ttcctattagatctgtcgccctacc

SEQ ID NO: 856 - DNA, 21 bp, synthetic construct
  misc_feature 1..21: note = Synthetic
  source 1..21: mol_type = other DNA
ctattagatctgtcgccctac

SEQ ID NO: 857 - DNA, 22 bp, synthetic construct
  misc_feature 1..22: note = Synthetic
  source 1..22: mol_type = other DNA
cctattagatctgtcgccctac

SEQ ID NO: 858 - DNA, 23 bp, synthetic construct
  misc_feature 1..23: note = Synthetic
  source 1..23: mol_type = other DNA
tcctattagatctgtcgccctac

SEQ ID NO: 859 - DNA, 24 bp, synthetic construct
  misc_feature 1..24: note = Synthetic
  source 1..24: mol_type = other DNA
ttcctattagatctgtcgccctac

SEQ ID NO: 860 - DNA, 25 bp, synthetic construct
  misc_feature 1..25: note = Synthetic
  source 1..25: mol_type = other DNA
attcctattagatctgtcgccctac

SEQ ID NO: 861 - DNA, 22 bp, synthetic construct
  misc_feature 1..22: note = Synthetic
  source 1..22: mol_type = other DNA
tcctattagatctgtcgcccta

SEQ ID NO: 862 - DNA, 23 bp, synthetic construct
  misc_feature 1..23: note = Synthetic
  source 1..23: mol_type = other DNA
ttcctattagatctgtcgcccta

SEQ ID NO: 863 - DNA, 24 bp, synthetic construct
  misc_feature 1..24: note = Synthetic
  source 1..24: mol_type = other DNA
attcctattagatctgtcgcccta

SEQ ID NO: 864 - DNA, 21 bp, synthetic construct
  misc_feature 1..21: note = Synthetic
  source 1..21: mol_type = other DNA
tcctattagatctgtcgccct

SEQ ID NO: 865 - DNA, 22 bp, synthetic construct
  misc_feature 1..22: note = Synthetic
  source 1..22: mol_type = other DNA
ttcctattagatctgtcgccct

SEQ ID NO: 866 - DNA, 23 bp, synthetic construct
  misc_feature 1..23: note = Synthetic
  source 1..23: mol_type = other DNA
attcctattagatctgtcgccct

SEQ ID NO: 867 - DNA, 20 bp, synthetic construct
  misc_feature 1..20: note = Synthetic
  source 1..20: mol_type = other DNA
tcctattagatctgtcgccc

SEQ ID NO: 868 - DNA, 21 bp, synthetic construct
  misc_feature 1..21: note = Synthetic
  source 1..21: mol_type = other DNA
ttcctattagatctgtcgccc

SEQ ID NO: 869 - DNA, 22 bp, synthetic construct
  misc_feature 1..22: note = Synthetic
  source 1..22: mol_type = other DNA
attcctattagatctgtcgccc

SEQ ID NO: 870 - DNA, 21 bp, synthetic construct
  misc_feature 1..21: note = Synthetic
  source 1..21: mol_type = other DNA
ctttcaccctgcttataatct

SEQ ID NO: 871 - DNA, 22 bp, synthetic construct
  misc_feature 1..22: note = Synthetic
  source 1..22: mol_type = other DNA
cctttcaccctgcttataatct

SEQ ID NO: 872 - DNA, 23 bp, synthetic construct
  misc_feature 1..23: note = Synthetic
  source 1..23: mol_type = other DNA
gcctttcaccctgcttataatct

SEQ ID NO: 873 - DNA, 24 bp, synthetic construct
  misc_feature 1..24: note = Synthetic
  source 1..24: mol_type = other DNA
tgcctttcaccctgcttataatct

SEQ ID NO: 874 - DNA, 25 bp, synthetic construct
  misc_feature 1..25: note = Synthetic
  source 1..25: mol_type = other DNA
gtgcctttcaccctgcttataatct

SEQ ID NO: 875 - DNA, 20 bp, synthetic construct
  misc_feature 1..20: note = Synthetic
  source 1..20: mol_type = other DNA
ctttcaccctgcttataatc

SEQ ID NO: 876 - DNA, 21 bp, synthetic construct
  misc_feature 1..21: note = Synthetic
  source 1..21: mol_type = other DNA
cctttcaccctgcttataatc

SEQ ID NO: 877 - DNA, 22 bp, synthetic construct
  misc_feature 1..22: note = Synthetic
  source 1..22: mol_type = other DNA
gcctttcaccctgcttataatc

SEQ ID NO: 878 - DNA, 23 bp, synthetic construct
  misc_feature 1..23: note = Synthetic
  source 1..23: mol_type = other DNA
tgcctttcaccctgcttataatc

SEQ ID NO: 879 - DNA, 24 bp, synthetic construct
  misc_feature 1..24: note = Synthetic
  source 1..24: mol_type = other DNA
gtgcctttcaccctgcttataatc

SEQ ID NO: 880-915 - skipped (36 entries)

SEQ ID NO: 916 - DNA, 16 bp, synthetic construct
  misc_feature 1..16: note = Synthetic
  source 1..16: mol_type = other DNA
ttcttctttctccagg

SEQ ID NO: 917-952 - skipped (36 entries)

SEQ ID NO: 953 - DNA, 16 bp, synthetic construct
  misc_feature 1..16: note = Synthetic
  source 1..16: mol_type = other DNA
cctggagaaagaagaa

SEQ ID NO: 954 - DNA, 148 bp, Homo sapiens
  source 1..148: mol_type = genomic DNA
gcgatttgacagatctgttgagaaatggcggcgttttcattatgatataaagatatttaatcagtggctaacagaagctgaacagtttctcagaaagacacaaattcctgagaattgggaacatgctaaatacaaatggtatcttaag

SEQ ID NO: 955 - DNA, 55 bp, Homo sapiens
  source 1..55: mol_type = genomic DNA
gcgatttgacagatctgttgagaaatggcggcgttttcattatgatataaagata

SEQ ID NO: 956 - DNA, 49 bp, Homo sapiens
  source 1..49: mol_type = genomic DNA
aaagatatttaatcagtggctaacagaagctgaacagtttctcagaaag

SEQ ID NO: 957 - DNA, 60 bp, Homo sapiens
  source 1..60: mol_type = genomic DNA
gaacatgctaaatacaaatggtatcttaaggtaagtctttgatttgttttttcgaaattg

SEQ ID NO: 958 - DNA, 248401 bp, Homo sapiens
  source 1..248401: mol_type = genomic DNA
gtaagtctttgatttgttttttcgaaattgtatttatcttcagcacatctggactctttaacttcttaaagatcaggttctgaagggtgatggaaattacttttgactgttgttgtcatcattatattactagaaagaaaattatcataatgataatattagagcacggtgctatggactttttgtgtcaggatgagagagtttgcctggacggagctggtttatctgataaactgcaaaatataattgaatctgtgacagagggaagcatcgtaacagcaaggtgttttgtggctttggggcagtgtgtatttcggctttatgttggaacctttccagaaggagaacttgtggcatacttagctaaaatgaagttgctagaaatatccatcatgataaaattacagttctgttttcctaaagacaattttgtagtgctgtagcaatatttctatatattctattgacaaaatgccttctgaaatagtccagaggccaaaacaatgcagagttaattgttggtacttattgacattttatggtttatgttaatagggaaacagcatatggatgataaccagtgtgtagtttaatttcaacttgtggtgtcctttgaatatgcaggtaaagatagattagattgtccaggatataatttggttgctaaattacatagtttaggcataagaaacactgtgtttattacacgaagacttaattatttttgcatcttttttagctcaaattgttcatgttgcaatagtcaatcaagtggatttgaattgtagccaatttttaatgccagaaaatactgattaagacagatgagggcaaaaaacacccagtagtttattaaatactttagatatttcaaaatgctggattcacaaaagcagtatcacatttgactttacaagtcttcattctcaaatatgtttccatagtaaatatgccctttaatattaaggagttaagcatttaaacacctatttatatgataagctatttaaacacagaaaatatttttaaaaccttgtgtaattatatgtgtatcaatcaaacttgcatgcacaccagcgttggcatttgtatagagaggaaatgtatggattcccaatctgctttaatatagaagatacattttaaaaatagcactgaagtgaattttgggctaatgtagcataatggggtttctgcctgagaggcagaaacatattagagttatataaaatgttttggggtagatatagaaaccacttgccattttcaatgatatccaacccaaggtagttatatatttcaatttatattttattatcaaattagtacttattgtgaaaaaaatcaagtaacatagaaatttgtaaaagtacctccattctactctttggaggatagttgttcagtatgaattttgctacatatttcaggctgggtttcttggaaagccattgtaaaatggagatttgtatgtagaaggttaactagggagtacttttacgatgaagcaatttgttttgatgtaacttggtgtagttttcttcatgtttcttgttcttgaagtcagttaagctcttgaatctgtgcatttaacatttcatcaaatttagaaacctttcaaccatttttttaaaaaaaatggaactccaattgtacatttattaggctccttaaagtgccccactactcactgatgttatgttcattgtctgtttggtctctcttttctctgtaatttgttttatataatctctattgtcaaattgactaatctttttcaaagtctaatctatggctaatcccatgtagtatatatttttaacatcagacattttcatctcttagaagtaaaagttgggtctttttatttcttccatgtgtctactcaacatgttcagtctttactttcttgactatatggaatacagatataataactgttagaatattcttctctactaattttatcatctgtgtctattctgggttaatttaaattgatttatttttctcctcattaagtgtgttgtttaactgcttctttggatgactggtaatttttgactatatgccagacattgtgaattttaacttagcgcgtgcttgatacttcaaataaattcaaatatattgaaataaatattctcaaacctcgttctggaacacagttaattcacttggaaacaatttgatcttttgagaatcttccttttatgctttgttatgaccagaacagtgtaagtttagggctactttttccccactactgaggcaaaacccttctgagtactctctctgatgtcctgtgaatgataaaatttttcactggggctcgtgggaacaggtggtattactagccacgtgtgagctctggtgattgtttcctttaattcttttgtgaagttctttccttagctttgagtggttttcttgcatacatgaactgatcaagactcagatgaagaataaaataaagctttctacaaatctccaaaatttcctctgtgtatatatcacctctctggtattttgccctgtgatcactagtcagccttgggctgctgaaactctcagcttcatcttttaacaaaagcctcctggcaaggatcactgtccttcaatgtctgatgttcaatgtgttgaaaaccgttgtagcatatattttgtctttttttttttttttttttttttaagtgtttcaggtgtttcaggcaggagattaagttcagcctcctttactccaacttgaaaacaagtccaaaacaaactattttgatgtaatttgatcttttaatacattaacattacacaattttgtgaatatatcataatttaaaattttcagagaatgtctaatggtcctcatttcttgacagtgtggtttagttgaaactgatgaacattttatcaaaacttttcccctcaattggatacttttttttttttgagatggaattttgcttttgtcacccaggctggagtggcatgatctcagctcactgcaacctctgcctccaggcttcaagcaattctcctgccttagcctcccgagtagctgggattacaggtgcccacccccacacctggctaatttttgtatttttagtagagacgagatttcaccatgttggtcaggctggtctagatctccgacctcaggtggtctgcctgtctcagcctcccaaagtgctgggattgcagacgtgagccaccatgcctggccaactggataattttaaaaagaccattttatttagtctattttttctcaatctatagatgagataagaaaaatcattctagatgtccaaggaaaaattctttcagaaaagagctgtgaatgatatcacaaaccccccaaacagttaaggtatttctttcctggttattttatgtccaaaatcatgcatatgaacatgtgcacacacatgagcgtgcacacacacatgaatacatatacacgcacataatgtaccttaggttatctttccattctgagtaattatcgtaaaatgggtaaaatcaaccccgtaagataccttcatcgataaggcaaatcaaagctttggtaatttctgctatcttggcctttgttgattgactaataatgaataagagaatgagtttcaatatttactatgaaattattttagaagacaggatgtagacagtggctgttagcaggcaattgtttggcatgagccagtaatggttactgtgaaaaaaatcaaccaagcagcccatatattaaacaaacacacgcagaagcacgttggagtctgaagcctcatatgtacaattttcagtaaagaaataacttttagatatgaaataaacaaatagatatatgttgtaaacttgtccctatgtattttgatcaaattgcatcatatttttttcactttaaagaagagaatttagtgctttaactgagacttagtgttatcattcaaaatatactgactgccaatagcagtagaaagataatctggttccatgcaactctattttttttcctctgtcgcaagtaaaagacaaaattaagtacatgaattagtgctttttgaagatattccagagcaatataccatgccactatggagaacctctctaaaaatatcccatttttttacctgagaaaaatattgatcatgttatatgccactcaaattggtttattaaattcgttgaatgatatcagcatctcttaatgcattcactaaacaagcagtaattgagtgcatatacaaagttttatcatccaccaaaacagtgacaatccacatgaggctctaatagaagtttagaaagggggttaagtggttaaatgctggactcagaaagattggattcaaatcccaggtcctttagcttaatagttgtagaatcttgtgaaaatatcttaattcttttcatgtctctgatttctcttctctaaaatggaaatataaatgagatgtgtataaagccacttggaatagcattttgcacaaaataattactcattaaatgtaagcccctattataactaatcactctttataagtgattagttcatatcaatacaaactaagacttatttactgaattatcgtctctaaacatccacactgcagaaaaaccaacctggaaatttcataaaaccttatttttatgtagtataatttcttctcaaagcataagggctcttggattaggaattgaggaaaattccaattcagccaaacgcatctgtttcagatagctgacacttctgcctactcatttcctagctaacaagaagaaatgttaatgggagttttcaaaggaaaagctgaacaccatgaaggaaagtgacacaaataatgttagctcatatattgacagggtgaatttgtgtgctttcaagtcccttcagtgaaaataggaaagtagaaattataaaatgccctaacatttaaagctagcatgttcttggagactaggaaaaaataagttttaaaacatgggctatgatagaatgagatggaaaatgtttgtagttgccagtagaaacaataacaattaccattagattaagtatttaaaccagctgaatatttttattaatggaaatggcatctgttttatgaaataatgctgctgaatgaaccatattaaaaatgaccagtatttcctgcagaacgttgtcgcagacatacaagcctgagaccctaaaatcttaaggtattccatttgaaatcgaccttaagacattaacagtagtggtattgtttagatgaaattttttaggctttaaatcaacaaatgttaagcagacatggggagcgaaacaccagtgtgttattctgacatgaataaactgctgtttttagggaaaaaatatagtcttgttaaggttaagctaattggttttctggtatcttttgcaatgttagtgtgttttactgctccataacctatgttatatggtaaatgtgcaatatatttatatatgttgctgtaaagaaatgtaataaaaaactgtttactttgtgatatgaaagtaaaaatttattcattgtcattgagcatacagaagtaaatatggattacatatgtcatattttaatgttcacatggtcccaccatcaaatgttgaaaaacttatagtttaacgtcatattctattgaagaaaaatacactcccttttctcaaatgtgaaatgtccagagagaatggaaaattacatataaagcatgtagttatagcatggtgaccctgctgtgatctctcagatgaggaacaaaagggagaaagaaagagcacactggtgctttggagttgagagaaggcaaaaaaagagtacaaaaatgtcaaagccaagtttagctgctcttcagctctccctttagctgctcttcagctttaccttaccatggttattagtgattgaagaaaattctaaagcactttttaaaggacccaattctgaagagtttagattcagagagcacaatggagttggagtgactcctgctcaaaagtttgagacaagcgagtccatgaaaagaccgtcctcctcttaatggaaatacccaggttttctcattcttctcgccttgctttcagcactcgcagcccagaaagcccttatctaacaggtactgccgttgaaaggtcattgacttgtacaaaaatgatgagtgctgaatagatgtgcataggtcactgacagtatctgctacagagaatgagttttcgtatttttattaggatacacctaacatggcaatctactgcctcaaagaactctataggaggtaagtgaatttatattaatacagattgaattaaaggataatctagaaaaaggcatatgatgtaaaaaaatcagacacaagtatattttctgtatagtcagtttttacattgtgatttcaccagctggctgctgagtttgacggcttcttaacagccacactgctgagattcaaatgctgatagaaactttgatggaaaaatcactggagtaaatatttctaccatctgttgcccttcactgggaccctaacgttaagaataattcataccattgcttgtcctttatatttccccagcagtaataaaatttcataagattttgttttgtggtcacaaagctatcctggtttctgtaactagaagacatacactagcataagggaatcagccggaaaatttactgctaagagaatttgtctctagtcacttactttaaggttacagcaatgtgtaagtgtgggaatacattttaaaatgagcttttcaaagttattagctggtagtggcatgagagttaagtctcttaatacagttaaacagttgggcacttcatccttgcgtaaatattgttacccttttattgctgcttggaaactcctctgcaactttttggcccctatccatcttttcagaagtagtaaataaccaatttactgggagtgtggtaccaggcagaaattccgagaggggctttcaatccttgcccatcaagtgtatctttcagaaataagtatattaaaataattggataatttcagtggcttgttattagacttccgttgtccagcatggcatgtttaagaagatgacagattttcatacattattggaaagaagcaagaacaaaaaaacataacttactgtagtaaccacggtaaagaactgcttaaaatgcaggataaacatgtcatccctaagggattcccattcttagagcatgaaattatcaagagagtaagagactacaaaaaatgagaagaatgctgattgcaaattccaaatagaaaaaatcaaaacaaaactgcgcaccatcattctggaagcaatgagaagcagaaattgtcatttaatgaaatgtaagattaaagttaatagaagtaattttcatgaaataatattttgcaaggacgatgttccagccatattgatcttcgtgttttcttttcacatcccttcttactgttccctagaatgcttgtttctacctttaaatttgcttttctctctaccagagggctctaccctatctccagtttctcaccatgtcccaatctactccctctcagaatttttgtacacttccctttatatatatttgtgctctaattttatattcacagatatgccttttgtaactcccccatcttaaagaaagcacacacgtacgcacacatgcacacacacaaaattgaactctttctgggagatctgcttaactttcttcataactctgtcacttgctgaaactgtagtatgtgttttcatgtttattatcttttccattagaatgaacatattttgggtacttggtctttctcgatcaccaatatacctcggtacgtagaaaaattgattcatatattgaaaatgtaatattcagtagaacgaataaatacataaataaatttaaaaatgatacttttattgtattacctgagacaaatgatccccaagtttgtccttgcttttcatagccaaaacattctctcttacattgagcttccttcacctcttctgtgtacagagcacttaaaattttcacattgcctgatactttaacaatatgatggccctgttctcttacccattggagcatatgttaaataccagaacccatgtaacaaacatatattgtgatcctactgtgtgcaaagcagatactgcttgctgctaggaatacagagctgactaagagctccttttctctttatgagctcacagtctcatgagttcaacgtcttaaggcacaacgtctaaagcaaagggcagtaagtaaacactccagaaagtactggatctggcctaggacaaatggtgggttgtttttccagctgttatttttcctgccccctaattgacagtcctccattacacctctgggatacctagtctgacttgggaaaacctgactttgggaatcagaggcagtctctcttgcttatatatgaggaactctaatggatacttactgtcattagagaaactctgcttctagcctggctccttttgtaaagaaggttgagtccccttggagagcctgcagaacataaccatttgcatgtaatgaacagtttgtaatactttgagattgatgtgcaatttctatttgacaagggaaaaacaattaggattaaccgtggtcgtatatcccagaataccaacgttgtttccacactctaagtgttgttgggtcattatatgagattcataattttgtcctgttgtacccacgtttgcattaccattcagtcttaatttattataccctattaaaagtttttttggtaatttgttcttattgctactcaggcattaaaatgtctgcaggctgtgaaaatgaataaatttaatgtggcagcatagttctcaaaatcctggctttacaactcatagtacaggcttgtattgtaaatcctagttaacatggatttatttgaaaatccaattttactgctaatcttaaataacacatttttcaaacattttatccttgaatttctatttttttataatttatggctgttgtatgtatttacaaaaggacaatgtgtgtacttttaaatactagtaatggattgctgaaacaactgtaactttaaaacaatgcaattgttaaaaaaataaactgtgcagcctggcttaatggaggcttatgaacatatgattaagatatatgctataataagcaaattcactcaactgatagttcataggaactttcaaatttaatctcataaccagtgctatccttcaaagaatggtcagggcaatttaacgagtacatgaccacgcaagataatttcattgaagagtggctgaactgttgaaatattttctagtctccttgggatatcattaagagcagaaattttgaaatggaattgtaatgatgttcagaaaagataagtaggtaactctcttaatacgttttgtgctgctgtaacaaagtacctaagactaggtaataatttgtaatgaacaaaaatgtattggctcacagttctggagactaggaagtctaacattaaggtgtcagcctctggcgagggcctacttgatatgtcatcacatgatggacgattagagggcaagaaagatcaaaagggggctgaactcccacttttataagggaaccaaacccactcgtgagggtggagccctcaatccttaatcacctcctaaagctcccaccccttaatactgtcacaatggcaattaaatttcaacatcagttttggagggaaaaacattgaaaccatagtagtgatactgactactaccacacagggcttgggaggctaccctagctgttgcacccaagagatgaatcttctaatgtgattacctttatcattttttttactttattaaaatacttttattttacatgtatacttttgtctacccaccatttccatgtctgaccactgctactactatgtcctagcataacattccatacatccttaaaaccaagcaaagggtggagttccatctttaaaaactaaacaggcattttggacaacacattcttggcaatggaatctggacaacatttatcaaacatggtagggaaggttctcactctgcattatcaaaacgacagccagatatcaactgttacagaaacgaaatcagatggaaaatttttaacaaattgtttaaactattttcttagagagacttcctccactgccagagatcttgaatagcctctggtcagtcatctggaagcaattcttcacataattcatgaacttggcttccactttaggaagagaaccacctttttctatacttgcttgcatttttgctttaatgtcttctacagaactaggtcctttgggtgttttaggagtttttccttgttttgaaggattcttgtccttttgatcttggtgttgacggttttgagtcttttccattccgatttgacttttgtgcatttttggctggagtatctcatatagatttcttcactggcgctttttcttcagtttcctcatcatcaaaatcatcatcatcatcaaaatcatcatcttcatcagcagcaagttttacttttttctgtggaaccttgctaccacctccaggagcagatcgctttccagatatacttatgagtttcacatcctcctcctgttcgtcttctgactctgtatcttcctccccagctactaaatgctgtccactcacatgcactggccctgaaccacacttcaaccgtaagaccactgatggtgttatttcaaagccctcaagggaaaccatgggctgtacagacattttcaaagctgccagtgttactttaattggactgcctttgtaactcattgcctctgcttcaacaatgtgcaatttatcctttgccccagcccctaaactgaccgttcttaaagataactgttgctcaatttcattattatccaccttaaagtgatcatctttgtcggcctttagttcacaaccaaaaagatagttttggggcctcagaggactcatgtccatcatcgtccatcaggtggcaggacgcacttaggtgggagagaaggcagatgatgataaaggaccactgctcaagagaacagctgtgcaggacagaatcacaccagggagattacctttatcttagaaaacctgaacatcttgtgtactttgacacttctctacatttcacctaacctttaacatcaacacatttattcagaaaacttttacttttggagctgctctgtgtcaggctctatgctaggtgctcaggatattgaaattgatacaatcctaacctattcacatataatccaaggtttgctgaaattgatggacatttaaacaattgaaacatttaagtggtataattagcaaatggacatttaagccataaaaatagcatctaatagatataatagaggtcggtacaccattgatgagtcagagcagaggcaacccaaagagtaactagccagaagaattgggaaagcttcatagagagagcgatatgaaaataagggagagaattgtaaatccatgaaaatgagaaaaagttgaaaagtgatggtgtcagaaaaacttgtggtatgataatgacaagatgagaggaactcttggtaagcgtgttggatgcatggaaagaaatggcacaaaataatgctgaggacattttttattttattgttggttttgttttggttaatttcattttttaaatctagtatgctagtgttcattgtccaaactgtgaatcataaactcagtttgtggatcaacaccggcctttgatttttagtgaaacaaaatagaaaatatcagcattcatcacaaatagatgtttcacagattttttgttttaattgcgactgtgtgtgtgtgggtgtgtgtgtgtgtgtgtgtgtgtgtgtgtgtatgtgagagagagagagagagagagagagagagatggcttggatgtttatcacctccgaatcttatattgaaatgtgatttccaatgttggaggcagggcctggtaggtgtgattggatcatgtgggtggatccttcatgaatgatccctttggtgacaagttagttcatgctatatgtggttgtttaaaagagtatgagacctcaacccccacctgtttcctgctctcccctttgccttccaccatggttggttgtaaacttcctgaggctctcaccagaagtagatgccagtgacatgcttcctgtacagcctgcagaaccgtaagtcaaaagaaaaccccttttctttttaaagcacccagtttcaggtatttctttatagcaatgcaagaagggactaacacagttgtatgtgtatgtgtgtgttgggtgatttctggttgagtgtcacaaggttgtaatatggtgagtgtaaggaagtataagttttagaaaattaagaagccagttcagaaaactaatacttttggaaaatagtacaaaatcaactttacaagaatatacacagaaagatgtaatacaagatttatttcattgcagtaatttataaagttggtttagtgccttgcttttgcatgctgttttaaaaattaccaagaatatgacttcatgtgattttgaaatactcccagcaagataggtagaaaaggtattcttataactcttagacaaaaatttcggaaagtttaaacgctttatcccaaatcataaagctaataaatgaagaatctgggattcaaacaccatattttttttactgttcatcagctagaagttagaaatgttaagccaaaaacattaagtcactgctctgcctaataaatcttgaggaaactaataaaaagaataataccactgactacaggacaaggtcttcctaagagaccttaaatatattaagtgatgaagatgaaacttcttttattcataaaaatgttatttagttatgagtagagctctaattaaacttattttatattgtcatcagtaaagttgagacataacatatttattaatataattataatttgacccatagtgtattaaaagaaggatgttaaaaggagttgttattagagatgatgttagggttgttgatgataataacagtagtcataacataacaaagcacttcataatttaagaagtgccttcaattacattgttactctcatggtaatctctgtttgatatatagatttggcggattctatatcactctaagacataggttactgaggtgacggaggaatttagcaagcggctgtcaaatggaggacatgagcattggattgtgtatggcaagggctgatggtctctaagaaagcctcttggtttccacagggcagaagccctttgaagatcatagccaaggatttagtaattgcctccctttcagaataccctcaagagaaaagcccaccataagacatggttccctacaggcaaaactgcttttccttaaaatttactgttccctgaatatcagccttctttggctcattcaacatagttttcttaagtttcaggacagtgctgcagaccaaaagtttcaacattgaggaaaacaatactacttgtgcagtgaccctacctcagtcagggaggcagatgcctgcctttatgtgagggaataaggaatcaatcatatttccagcactcaagaaagccagtctagtgcagggagagatagatacataaacctcaaagttatgatatagcataatagttttaaatttccataataactgtattttaaaagttttatagaaacagaagagatgacctcagtctggaaaagccagcttggagaatggcaaccaatattaagtggcaaaagctttgggatcccaggcctccagatggagggtgatagcatgggccagacaggtaggttaggaaaactttgcaaaggacattacacggtacacagacaagtctgtgttttagcctataaaccacagttgcagaatgtgtttgagcaaaggcttttggggatgagatttgcacttttcaagatttaagtttgtttaggatacttacggtttgctgtatacttcctgggtttttacattataattacggtttgaactttaaaggaaaactgcagtttagcatacttgaaagagtgcaacttcaagtcatgattggagacagatatttaacagattttgtgatcctgtgatgcttattttcttctcagacataccacatgacaatcatttttaaacagtttatttctactttagcatccatctgaaggtgttgtgtatgttttctgcttgaaaataaagcagtgggctgggtgcggtggctcacgcctgtaatcccagcactttgggaggccgaggcaggcagatcactaggtcaagaaatcgagaccatcctggccaacatggcgaaaccccatctctactaaaaatatgaaaattagccaggcgtggtggtgcatgcctagagtcccagctacttgggaggctgaggcaggagtatcgcttgaacccgagaggcggaggtcgcagtgagccaagatcgtgccactgcactccagcctggcgacagagtgagactctgtctcaaaagaaataaaaaagaaaataaagcagtgaatgcgattaagatggatttattatgatcataaagtactcaggagtcttattttaaaagacagcattactgtaattaaaaatatagggaagaaactaatgctgttttgcgtatcattctcagctctctcaaaatcagatattaagctcttgctgccaaaggagactatactgcacggtgctcacctgcataaactttgagagggttgaattgtgccaagcaattctctcaatacataaattaaccaaatatttgttgacctactgtgtgacaagtattattccaggaaataagagatccagcaatgaaacaagtatggcttcttatagagttcccaaaaaggaaataaaaggatatacgtatagtgatatccctgaattaaatttctcttttgaaaataaaaattctatcataagctgtaactgccaacacttcaatactcattcagcagttttcagggatttgtaccttttgacttatgagaatttggaagtctaattgtatcattgcactggagtcttaaagaaacagataagcgaatgactttgcctgtatcattgttgactgtacttacaatcagaaaggggcacaggacagatgccagggagtaagtggacagcccataaatggaatggtaagaaagaagaactatagtggatttggaaagttcccttcagcattttccctagacaatctttggctgtgtttgcatgatcagtatttcattcacaggatattgagctcttgatatagttctcaaaacccaaaatgaaataagaagtctactctttatttaaattcaaattccagagagttaagtaactttccaggaggtaatctaaatatggcctccttgttggggggggggggggtgtttgaatttgcatataaatagtctcacccttaaaggaaaaccacagatggtggtaatgatgtagtcataatgtacatctccacagtggtggaacaaaatatccacagttttgctttccccagtttcagtgacccatggtcaactgctgtctgaaaataggtgactacaatacaataagatattttaagagagagaaagaaagatcacattcacatgattttcattacaatgtattgttataattgttctatttttattcatgatttttaatctcttaactgcgccaaatttataaattaaaatttatcacaagtacatatagtttatatagggctcagtactatctgcagtttcagacatccactgggagtcttggaatgtatcccctacagataaggggtaaaccactgtatcctatttgtgtgaatgctacaggtgttgtgagctcataacaatatgacatcaacactgaactaatccaggatttggtagtgagagtgatgtatttgcaaggagtgagacgtggtgcctcatccaagcagagaaataattttgaaatttgcctgacaataaaaatcacaatgtgaggtctctctttagagctgcaaagtccaattcagtgccccctagccacataagatactgagctcttaaaatgcggctagtactaattgagatgggcactgagtataacacacatgccagggtttgaatacttagaaccaaaaaggaagtaaatgctcatttattgcatgttaaaattatggttttattatagttgattaaataaaatatataattaaattgacttcattttgcttttaaaaatgtggctatgaaaaatttcaaattatatatgtgtgtgattacatatgtgtgttttcacatatgtaactgatgttacatgtgaaattgattgttacatgtgacatgtaaaacacgttacctaacacgtgcatatgtatgcaacacatatgtaacgtgttacatatataacacgttacatatgtattgttacatgtgtgcttgcattacacacatgcataatatgaaattacatgtaatttcaaattacatgtgtatattttgaaaattacaaattacgtattttgttatttttgctttacaaagtcaaatttaccctatttaataaagcatcatgagttttttataactagtaaactttgagacttttgtaggagaataaataatgcttattataaaaactgattggaaaagtgagctggagcagggagcggaggaaaaaggactagagatcacctttcttcccagctccgctcctctcccaaccttttttctttccattctctcatcccaattcaaaagtgcagagttcacagttggtgtgctgatttagaaaacagatatataaacagccttaaattttctccaggcttttacaatgaaaagaagttcaatatcaaaagtaacaatataatctgtggaaaggtatagggggctatgtttttgaggtagaaactataggtgctcctggccaagcatggtggttcaagcctgtaatcccagcactttgggaagctggggcgagagtattgcttgagcccagaagtttgagtctagcctggcctacagggtgaaactccacctctactaaaaatacacacacacacacacacacacacacacacacacacacacacacacaaaagccttgcgtggtggcgcttgctgatagtcccagctactcaggaggctgaggcgggaagattgcttgaacctgggagacagaggttgcagtgagctgagatagcaccactgcactccgacctgggtgacagagtaagactgtctcaaaaaaaaaagaaaagaaagaaagtataggcactccttatatgcagctgctcacacccctcctccttcacacccctcccccttcacacccctcccccttccccaaaatttgcaaggggaaaaatgtgtgtaattggcagtatttagtggcgtgcaaccgtgagtcatcagactgcacatcctcacttctgctagtggctcagtacccaacagcactcagtgaaaactaactcatttcaaaggtgaaaacaagtgagtttggccaccagggagtgttcaaaactgtcagtgctgaagcaaatgtggagggtgttctgtagtttgttcaggttgatatttgtggtccaacccctagctgaactactaattattaatatctgtcttgatggtgcctcaggagaaagcttctcaaagggaatcaatgttcaaattatagtaggtatcttggccatggaagttattgaattttagccaatacttgctactctttcatttatagtgtgagaatgcagtgtaatgaacctgactctcactgtcctgacttgcctttctcatcgcattcacaataagcacgtcaatacgtatacacatttcatatttctaaagtttactttatttccttattgtacatcgctgtgctgctgatggaagagaaaaggaaaaacactattgattgcaaaactgttttatctttggtggcttagattttttttgtatgatatgtaacgtcttgcatacctaaggcaacacgaagctaaatagatttgcatatagcatgtattttttccaattaaatgtttaattttgttcagagtatactggggacattttgaataatggagaaaagtacaaagaaaattcataattctaccacctatcagcacagtgaaattttatgaagaaacataattttcatgtaaatcatagtgaactcacggtaggttttatttaatacagtaattggagagctggtaggaagacaaaactggttcaaaagagaatacaagaaacaaatgcttctataatgagtgaatttttaaaaaagtattctggaataagattagtgaataagatactaaactcgttgataccctacagcctttggggttatatcctctactgggtaaaaagtcatttacatcatatcagttttctaaaatttgcattgaacttcatagcgttgtaacatgtgtgggcccaaattaatagtaaacagtaagagttgctttactctgaaaatattgaagctcttgtgagggtgtgaggagtttgttagaaaacaacgctaccattattttgaaacacacacgatcatcttttgttttacttctaagttttggataatttttcttaaattatcttattatcttatccattttcttaatttccttaaccttttaaatgtttctcctaggcacttttattgatttttggaatatagttgatatgtgctgaatttttatcatccagttttaattctactgaaaaatctaaaagatgttcatcaactactatatttcaaatgcatacatcccctttcatgctaaagaaactgtatgggaaacacagtctgacattttcaggacctggtatcattaaaagtcttgacactgttaaaattaaacaacgccttttttaaaatcaaaggatacaaaagggctgtgttggtcagaggatacaaaatttcagttagataggagacataagttcatgagatcttttgtacgacatagtgactataattaataataatatgttttcgaaaattactaagagagtcgattttaagtgttctcaccgcaaaaaaatagtatgtgaggtaatgcatatgttaattagctcattttagctagtccacatttttcaatacaatgtgttgtataatacgtgatatatacaacttatattttccaattccaataagtaaaaataaatgtaaattatttgaaataaataaaatgtgaagaacatccacttttcatatgaaaccatgagatattttctgttaaaagattaaatgtccaataaatttttgatgttaacagaaacaaaaatgtttaatatttaaatacatatttgcatgctattgaccccctgaagttcactgctgggctaagtgaaccaactatatcttaagtcaaaaatgctgaaattcttccccaaatcccaaagctcatgaaaacataaacagaaaatttccaaataattctacagggaaaataagacacactatttgatctgatcaaacaacgggatgattatggttaataatgagttacttgtacatttaaaaataactaaaggagtgtgattggattgtttgtaacacaaaggagaaatgcttgaagggatggataccccgttctccatgatgtgattattacccattgcctgcctgtgtcaaaacatctcatgtaccctacaaatatatactcctacgatgtacccacaaaaattaaaataaaaaagagagggacccgaagataagctaatatttaagctcatcatacttattaagataagcaatacataccgaaagtaatagcatttaaaaccagatgttgggggagggttctaacttgttcattaaaattcaaagtcacctgtcttgttttttcttttgtttttgtttttttttttttttttttgagatggagtctcgctctgtcaccccaggctggagtacagtggcgcgatcttggctcactgcaagctctgcctcccgggtttacgccattctcctgcctcagcctcccgagtagctggtactacaggcgctggctaccacgccccgctaatttttttgtatttttagtagagacggggtttcaccgtgttagccaggatggtctcgatctcctgacctcgtgatctgcccaccttggcctcccaaagtgctgggattacaggcgtgagccaccgtgccaggccacctgtcttgttttatcatgatcccgagagtatatatgtatgtgtacagctcatctaaaccctttttctttcaacatgatcaatagattgaacattggagatattttataagaaataatgaagacaactcaatcagcacatatatatattaaatgtggaatctataatgattgcgaagcctgaagcaaactaaatattcagtaataggttctttttttccatggtatatccatttgaatatataacataaatgccttacatttgttttaactatttaaggtttatgttgttagtgtgatgaaatggctggcaaaagtcagaaactcaggaaagtttcaggcttatatctggagcctggttttctttcttcaaggtagaacctctgtgaagtgaaaaattttttttatatctggagcaataatgtagaagcttaaatgtattatccaagttgtcataagcctattatttctttacattactgaagtgaaagacagcattaatggctaaatgccatacttggctataatttatattgtttaggactggaaatgagcctgaaatgtacatttttttccaaaatagttcatgtaatatttgaaacctgacaagtaacctgatgatttcatggaataccatcaaatataaatgtgaagttttaaagacacagggaaatactcagaataaaccccctaaccacaggccagcagaagaactagacttgagaaaatgaatgggaagatagatagtaacaaatgacttctttggcagccttatatatgcttagtcttatagactgttttatggatgctctgcactctatttccagcaagtatggcatttggaacaggaccacacgagacaaactatgagttcacatttcccacaactgcacagatagaaagagggaacaacagaatactccctttcttcttgaaacaataacttctgttgaagctcactggcttcttttcagctgtttctgctagctcctcctccgcctcttgacctctaaggcaatgctcttcaaaatttcaagactgctttctaattgaaacaaaacttataagcacatttcttcccacaaaatgtacatttatttgtaaatcatatatgaatatgactaagcatgtaaacgtatgtgaaaatagaaatcaataaatataaatgcaaacacaaatagaagcattcacagttttcttttgtgtcccagtgagttgttccaaattcctcggaggtaggtatgtcacagtttgagactataccttcaatcctagggtttctggtttcgctctcctcctaggtgatagcatccatttctacggacttaactgccatctttagttgaataactcctctatctttccatcccatatttctcttgattccaaacctgcttgttcacctgagcatatgacacaattcattggctgccgcacatgcagctttgacattttatttaaaatctttccccttccccagccctcatctatttcacagtagtatcttcttcttatctacttgattggtaagcagagtccacatgattccatcatttatctcccattttatatctaatctataagcaagtaatgcaatgcaacttctgtctccaaaaatttattttgaatttgccttctcttcctctgcatctcccccatcttaggccaggtcacctctgccctcttgccagattaggtcacattctcttactactgttgttattctcttcctattcaatcctacaccgcagcaaaatggatcttctcaaaatgtcagctagataaaggcatttctgtgcttaaggccctcatggatttatcttattaggatgaacacccaactctttattatggcttagaatacaatgaattacaacacataatgaatatattatatttctatctttaccattttcttcttaagtcaacctttctcaatccatataggataatcatattagtgcttcctcactttctaaaacatctcagggcctttgcacgtgtttctctgttcttagacccagaatgctcttccttttctctttgtgtagctaggtgcttctttccatttacgtatcacatgaaatgcagtcattccctcctccttccctcactacctcacaaaaagttgatgcctctgttaaaccatgaatggaattttactcggcagtgaatagaggaaaaaccaatggtaaaagcaaccatatgaatgaatgaatgtcaaaaatattatgctgagccaaaagtcatagacacaaatatgggtatttacatgaagttaaagcacagcaaaactcaattacggtaatagaattaagaaagtggttacctctgggtgagggttggaattgagtggacagaggcattagtgactttttcggggtaatggaaatgttgtctattttgttcaggtggtgaatacatagatacattcaattgtcaaaacacatccatccaaacacttagacttttgcactttattatatgcaaattatgcctcaactgaaaaaagtttgttttcaaaattatatcaacagttgaaattcttttaaagatttgattcaaatgagattaattctgtatccatcattgatgtatgatagttttgtatgtagttaaggttattggagataattgaaagttatactcacaagaaggctgcataatatgaagtttatctgccttgatctttaatagctttcgcgatttcaacttcttcacagctctgtaagaaggcagtgtggcatgttgaagcaagcatgtgttttagagtaacacagagctggtatacaaccccatgtctaccaattatcaatgatgtgggtatgttgctggatctcaataatcttccactgtgaaatggaatgtaacacctgactcacaacgcaaaggtatttaccttatgtaatataattcctgcgatcctgggacctcccttaatcccatccacagatgccaggttaaagaccccatcacagactagaacaagttgggatgtcaaaatgaataaatattaatcgaagggcctattgtgattgaacaccacgcagtaggcactctctaatacctaccgtctccctcctttttgggggaaacattctaaatgtgcaaaaaataaagggttatttgctttctggcacttgggatcgatttattgaggatatgttagcagaacagcaaaggtgaaacactaaaagcaccatcaatacacaggcagaggtgaagccataaagcctttattttttaaattaatgcacaatatataagaggtatgttagaatgaacgtccaatccctgaaaggatatacgaaagacattcataaaattacatgggcatgttttcttaatgttcaaaatattgttttaattagtgtattatgagtttattcatgtgtctgtgtgttgtgttatattaatcttttcttgcattgctataaagaaatacctgagactgggtaatggatgagaaaagacacttacttggctcacagttctgcaggctgtaccggaagcatagcagcatctccttctgtggaggcttcgggaagcttccagtcgtggcagaaggcagaacgggagcaggcacttcacctggctagagcaggagcaagagagacagaatgaagtaccacacacgtgtaaacagccagatctcagagaactcactcatcatcatgaggatggcaccaagaggatggtgttaaaccattcatgagaaatccacacacatgatccagtcacctcccaccaggccccacctccaacactgggaattacatttcaagatgagatttgggcggggacacatatccaaatgatatccatgtttaatcagaaaaataaaagttaacagtaacagtgattttactttgtagacctttgctaatggctgaaatctagctccattccgagaacagcctgcggtacacattttgaaagatagttgattaatatgaaagaagccttatctgtagtccttaaggccattatggtttacatatatgagtaaatattccaaagtagccatgccagttaacatatatccagagtctaaaggccactgggcgacaaaagtaaaagatacatagcaattgttactttatatcacagtaattcttgtatattttaaatggatatttgcatttgaggatatccacttaagagttaggtacatggctcttacatttaagtaacatttacttaaatttctggctgcagcaattccacataggtagaaatgaagtctgaattgagttgggggtctttgcagtgctctctctgttcattggctattttgacaatgctgagagatgtggttagccattctttttcatttcatattggcaacctagagagcaattaagccttctccccttaactagatgtatgttttactcatttctggatctttatggctgactttgaatcctagcctgtggtagaaagcatggtgtcagaaggaactatgagttaagactatgcatacttggctttgagtcttgggtatcatacctccctcatagagtgaaggaaccagggattcttcttgaggcccagacccggcatccatgttaagaatacctgtgcaattttgcttcctgatatttaaggtgaaaatgcatgtttgggtcattgtgaggattatgtgagatgttacttttaaatataggcccccttattatatgctctcatagtttcaggcaacacttgtcgtatttgtaacctcagttttaactgtaatgtttccatcaatgtccctcttacctggtacaggggctcttcatattcttggattacaaatctgtgaatgcaaccatgcatcaaaaatattcagaaaaacaatgaatgcctacctctgtactgatgatttataggtgtttttcttgtcattattccctaaacagtacaatgtaataagtatttatatagcatttacattgtattaagtattataagtaatctagagatgttttaaagtatataggaggatgtgtgtaggttgtatggaaatagtatgtcattttatatgtcacttgaacatttgtggatttgctatccgtggggatcctggaaccaatcccccatggatactgagggacaattgtattataagcagcaagagggaaaggaatctgtctattttgcccaaaatcgtgttcccgggacctagcatagctcctggcaaagagtatacaacaaatatgcattgaggagagaacagagggaaccattatccccttattctcgctgttccttcatgtaatgaataaacagtcaaatcttacaagagattttaaaccagtcagagaaaagttggaagttagttagttgttcatacattgagaagcctcgacgctgtgtcatctaggtaatgaaagatctagggaagtttagcagggagaagaagagagatgatagttgtcttcaaatgtttgaaggactgttacggacacaaaaatttaaacttgtgctgaataattccaagaggtacacagtctctcgatagaagctaaagtggggggtgacatttgactcaacaaaaagccatctaaatatcagaactttcaaaagcaggaactggtgcctcaattaatagtgtgttttctagcacttatgatacctgatcataggcaagataatgaaaaattgggacctgggagttatacatgggaatttgtttatcagttgggtgattaggagaggtggccttaaagtcctgttgtgttctaagagtctgtgattctgagtcttatttcccaacaagagaggtacagagcagaagatgggattgggagaaataggataaagataccaggaaatcctaaaggtaagaaaaggaaggcagacctgaagctaactctatacttcaggtgcttgcctagagccagccctacctacttagagaatgttgaagagccagttaaaacatctttaacacggatgtaaaacaaaactatcaaaacctgaagatttcgaatgttctaacctactcgtcagttgggcttttttcacaaatacttcagtaaataggcataaatttattttttaatgatagaaaatatctcttaaagaacttataactgtggataaaagcaccaccataaaaatcttgtggtgaaatatatatatatatatatatatatatatatatataaaattttaaatatggttagctagaatatgacgacaatgtttatgaaacacagagactcttgacaagtcccatgtatacactataaaactttaagttatccactattcactcactaagcttatacttaatgagtgtctgctgtgtcacttattgcggaaggcacaggcggtatagcattgcacaaaacatatgtggtctctgatggagtttttcagtctagtggtgaaagcagtgaatgggtgtacagatgttaaataattgtacaattagttgcatgtgtaaacgtcaaagttcagaagatgacaattgatctacggcaatgtttctcaatctctgacgttttgagccaaatacatctttgttgtggtggactgccctgtccactataggatgtttggcatcacaactgacctctgcccattagatgccaatagtactctcttctttaatcacaaatttgtcccagacatttccaaatgtcccttggggagcaaaatcatccctagttgaaaatcactggtctagggggaggtctttatgaggaagtaacatctaagaaagctggtatgtttacatatagctacagtctattacacatgtatacatatgtaacaagcctgcatgttgtgcacatgtaccctagaacttaaagtataataaaaaaaatgtaacaaaacaatacagtatgataagtgctatgggaccaaagatgaaagggttctactgcacagttatgaactcatagttaggcttttggggtcaaaattttgctgaagatatttgccacccacgtgacctttggcaggtgacttagcttattcatgcctcagttttatccaatgtgaaatggggctggaaagtcccatgtacttcctaataactttgcggaaataatatgtggttatataggaaaaaaaaaaaaatcctagaagtatgcctgctgcgtagtaaaaggaaggagaaggataaagagaaatctgcattttttcttctgtaatggggcagatagtaaatattttaagttttgtggcccaaatagtctctgtcacatttacttgattctgcagttgtggcattggaagcagctatggacaatacttaaattagtaggtgtgcctgtgctttcaataaaattttataaatacaaagtttgcaaaacaaagttgttttttttttttttgtagtttgctgacaccctagtaaagaagcaccattgtcaacgttaaaaattatcaaatttttatttttcaaagttttcaaatttgctttgcttggtctagctcatgaaataagtcaaaagtagcaagacctccacctctaaaataataatagtaatgataacctcaaaaggaaagaagaaatatttttaaagaagaaaaattattgttaaataggattattgtgcagagaaaacctaggagactcaattttaaaatctgtgaaataattttaaaaatactttatgaatagatacataatagcttttattcatattaatgactataaatgcaaatggaaatatttcattcacactgatgacaatgtataaattaaggaggaataaaaattgtagaccctataggtgaaaagcataaaaatatacataagaaaaagcaaaaattgactacgtaggattgttttaggatttaagatttattgtcattaaacttgcaataccagccaagttaacatttgaatttaatacagttataatcagaatgcttttgatgtgtttgggggcaatataatttcaaaggaaataggcaatgatgtaatttaaagtttatatagaaggaaattgtgtgcgtgtatgtgtgtgtataaattggaaacaattttattaataagcatattatggcagcaacatacacttccagatttctactatactttgaagtaattgtgatcaaaaccacagtgtgctggcataaggctagagaaatgggttagtggtttacaagtgagagtccaggaaaacatccaaataagattggatattttagttctgtgtggatagcctatttcacttaataaatagtgtctcgtaattgactattcatgtacctataagtttaactatagaccaaaaaaacgccctactagattaaggagctaactagaaatataaattcatataaacaataaaggaaagtgtaggactttataagcttcatgggagacagatttttggtaagtcaggaagcctggaagacttaaaacataaaattggcagactgaattaactgatagtttaaagcttccatagagcaaaataaatcataaaccaagttttaaaatatataatggatttagagaaggtatttacaaaaatatatgactaatggaggttaataataacaatatgtaagaaggatatgaaatggcattttactataaaggtcaaacaaatgacctataagcataataaatcatattaatctccactagtaataactacacacatctacataatatagatgttacgcctgcatttgatttactttatctgtcttttggcagaactatttgtcaccagataaaaaattctatatcattaccagaaaggtatattattataatgtttattatgttgcagttgtaaaagaaataacagcttttcaattgtttacaaatcctatagaacatttactgaaatacatttacattttgtggcaaacttggatttaaataccgtgttcgtgctttgttttatgccgttttcccatcttttctccaggaatttgattgtgcttcattgaaagctaaaaagaaaaaaaaaataattctggttttggtttaaaaaattaggttaggggttaaaaagttgtacgttgtcttctgtaaaaataaaaaacaagttttctttgtttcttggaggctttatattaaatggatttttaattcatagacagcatattgtgatgaaatttccccatgagcttcacattttgtttcaatagcagaaactaacttggttgcagttactgcccttctgagaacagtgttctggaataattttgacatacatatgtatctctttttaaaacatgtgttaatcttttcataaagaaagttttcccagctgtgtcacctgtgactccaactttctggggggacagggatatgagatgttggaagggaatggcttgaagaaataaagtgcaaaagacgtaatgctttcctgtggtagaaatgtattcagtgaccctgaatgaccttcctactcttgtcccttcatttttcccacaagtatggtctgggcaattataaaaattgacatttgcagtgggctcttctgtaaaagatgctcaatcagaaatgatttattttagaaaaagagatgatataaacatatatatcccctgtctcggaagtgtgaaggttgaaaagcaaggagatgatcttcaaagtgtctaaaatattgatttgtaacatcgttttatgaaagtgcttcagattattttttttcttggatggccccttatgctttggtcagttgatgctaaaatctgaacttctttattttaaaaaaaacttttaattttgaaaaaggaagttcacggtgctgtctaattctttttagatagtcattaatgtaaatgtaagagtcattctgagaaccacatctgctgatatgttccgttaaattacaagttctatgtgtatttgctttgctttcatacaatgaatcttctttactctcttccccacctgccagaaattgccccactcaacgttcataaaaggtccattttcaatcgctatatttatttcagaagcagagatatcatatattcaaattttagttactttccaatatcaagctaataactcacacaaataaatcaaactacagcaaaacagcaatctagcattcaacaaaacctccccaatgcacatatttcaagctgtagatatgtatcatccaccatgctgaaataatgtacatgttcaaatcaaatggaaaactagaatcaaaattgttgattacttcttatcagggcattttattatatttaagaaaaatacaaattaaatcattttcaggaagcaatccttctggctaagatttttttagcataatgcttaaagttaattgttgatctttatctataaattcaaaggtggactaaaaatgcagaatcaatcaggtagtccattttgcatcaggtgaaatatataaagcataaaacagcgagttacatttcctaacaaaattgaattacagtgagtaaaagtgacaggacaaatgcattaagaaaagatggactgaaatggatagagtagaatatatgcatctataaaacacagtcatatataatacactcattttttttcttacgagtgtgagattaatggaagaaaacaacaataataacaaaaccagtgtgatgtgtcagatttcaccttttaattaaaaaattattcacttcagaggggaattttctttcttgggttagctcaatcatgtcagatcttgttcatttaaaaggtcagtttacttgccttctgaggtttttgtttgggaaaaagaaaagaaaatagattttcattggtatcctgggtagaattaattgtttatcattcatttttaagatctccgagaggcagaaaaaggggaactgtgcaacccttttgtccttctggatctcaaaatgaagggatacattctgctacatgaaatgtggaattaagaccatgatgcaacatgataaacaacacaaatttgggggtgtctctgtgctatacattattgaatttttccatgctatacactttttggatgtgtctgtgctatttattcagtttttttaaataaaagtttttgtagactaaattgccctctctactttgcatcgtttttgaacaaaggattttcaagactgataagctcaaatgtatcatttattgtattcaagtagcattcaatttttctttagaagtataatttgtagatattttaacacagaaaacttgcaacactgctcatgataggcacttattatatattttttgaaagactatatggataatgattctaactttgacttttcctgttttgccttcactttagaattaagcagagaatcaaatccatattcctgggggcgatgcttggacaacagtatctctttaaagatctttgtgtgagtcgaaggtgcagccagactgggagttattgtgaagaaacagattcaggaaggttgagaaacttgcctaaggctaatcagatagttactggcaatgttgtttctaaatcactgtttggctccctcattcaatgaatctacactatgtgggactgcctcttgctcctgacatcttttgctgctgaaataaatgaactcaaagcctagaaggtagaaaagagggagttcagaattatattcaggcacaaataccaataaggctattgcccccagaactgcaacttctcttggtttaacagataactatttagctgtgaggtacaactgaggaagtggacacacaagttatcaggagattctgatgtgccagtttatatttcttgtcacaggtaatgattcgaaatttcttaaaacagctgtcctcacagtggagtaacctgggagtacatgaaggcattccaaggagtaggcacagatagttttaagggaatttatttctagatcttctactttattttgtactcttcctgaaaactgaattgcctgaaaaaaaaaaaaaaaaaaaaaagacatctgtagtcaagacctcaggctgtttctcctttctaaccacttgccttttctaaccacttctcccaatttaagaaaaaaagccttatatttcatccaactctgatcttactaaggcttcaaacaaaagaagcatgaatgactttcatgacagggcaacatagctttttgcaagaagagtggttgctaactctttgctttcaactgaacccgaagagaagacctgataagttgtcagccgatagatcattaaaaatacgttttggtaagcaatcatcatgtacttttagcatatgccatagcaggagcacaaatgattaagcaatgctactataatacaattccttccgtttctttctactcacctatttgaataagatttttcatcatttacatctatacagacaaaaattagggatagaattgatgctgaagcctttccaattgtagaattaatttatattcttctgaaggtgtataaattgttaaatacccatccatcttattaagagatgtattttcaataaaattttatttttatgtttatcaaattttataatatacatatattgttttggtcaattgcacgttaataattgtaacaatacctcaattgaaaaggtttgttttttacatttaggacttacagtaacagaaaaaaaacactcattgtgtatacatactgtttaagaaaagtatactaggtgatcaataagattttttcaggcataaacatatatcttagttttaagatatcgatatttacaatgtccctcaaattatattattttcagtcatttaagaatgaaaagtacatttcgaatgcggattttaaatctgcaagggttgactcatttttcaagagtctttttaggggatacagaagcaagaatgtttggagttccctgatcagtatctttaagagaaggtatttgttggtagttcctagcaaattccaacagcctgatgctacttaaaagataatagtaattattttaaataatgcttctgataaaaaacattcatgcacactcagtttaaaaagatatttaaacatttgtagttgtagtttgggaactcatgatacaagtacagtctgtaaatgaagctcttagtttgcaaatatcagagataagctattaaaatgcagaaattgaaattgccctgatatatgcataaattagtgtcatctccatcttgtcagttagagtattttttagattctctctatgtatacatacatatatatatatatatatttatatatatatatatatttgtgtagctgtgcatgtgtgtatttggactaatgggtcaaaggacagtactaacccaattcaataattaaagaaaacataattttgagaattagctttatggtaattgtttgacttaaatgagtagatcagagaagaataagggctttcccttatttaaacaagcttcatttttttatccaaacatttacttagctgattaagcttcacttgtttattttcttcaaagcattcattcaggtgggtactgagtaaactgaaatatcacaccagggaacttcaacaccatccaagtcttaaaggcttcacttgttcacagttggcatttagtgaatgtctaggctactgataatattgtgagtaagttggcagggatcataagaaatgataaaatacagttcttgaaaatgttatggtttgaggaaaagatctatgtttggaattagactgacttggattcaaactctggctgtacctttgggacaaggtgttcagaaactctagcctatgttttttttctgcaaaatgatcctcttttccaggattcctgtagagattcaaagatatgtgaatgtttagaaaaagaatagacttttgatcattgttaattcccttactttccccaattagacttgtaagactgggaagaaagctacacaaaagattgaacaaattatagctgacagaccatagcaaaagatacagggcaaaacttaaaggggaaaactacacattaaattattttaaaccattaaatagcactaacttttgtcagatattacaaccaaacaccactcaaattaaagtaaactgaataaaatgcctgtttttttctgtttactgatgttttcatttgcttcattcatttattggaagatataaaatgtgttagacactgttaggtgctgagtgtataaaaaaatcttattaatacaatttaaacacgcacacacatatatatggttataacaattgatgccatgtatgtactgtttatatgcctatacattattccacagacctggggggagggggatgtagagtcttaccagaaccataggaatcttctcacatcaacatttccttttgaagtttgttcatgaggcaccatccagataatactaccatctgcaatgtggcttgagaagatgttagatttttttattacacataataaggctgtaaagtatttctgtatttaggtagaggtatgtaatacaatatgtatataaaattacatatccaataaaatctggtgttaaataaggactagcttctatgataatatagtctaaaggcttttcatttggtgttatagaaattatgtgaaatatgtttcctggagtagaattattcgcatttcagctctctgacagtggaagaaaagctagagggagaggtgaacaagagagggagcataatggacaaagctttgctggaagccaaaccaccacttcatatgtcaaatctgacaggcctcccattttaggtgtgctgtcattgaagctttcagctgcaccttgcctgtggctaggctattttcaaagattaaaatgcgaaactggaaattaaatgcaacttaattcccaatttaaatttccattatttttgaaaagtaaaagattaaaagaaatgtataattgcaattctggtggaagaggtaattataggaaaggtgggatgtatttcaagtgggggatatagcttactgcagcagagaggaatctaagctatcattcttttgaaattggtctggaaatatgttttcacatggaaaatatactatatttttaggaatttccttgtcatattactgtatccttttctgttagaatataaattctgaattccctattccactgtagatctgcctccgattatattagctcttctgaagttatcaaaaaataatgagatatacaatattccatatatgtcaaagcaattatttttaggttaagtaataaaccaatgacctttaacccggtaatattctgggttgttcataaaaaaactatattcaggtaataatgtctttccacttaagcaactgaaaaaatacacaatacttaacatttggttaattaaatacctactccagacaaaaggattttctgttttcaagttatcttagcaagctgagcaggaagcaatgatatatccaatcagaatatccatggaagctctgctacagtttcaaaaagttctcatcaggcagcttttaaaatgcctactctgaaaatggtccaggttaaagaacaacagcttcctcgtcagatagcagtattgcttggccatgtttcttcctagcacaaaaaagtacctgctcttctctgagtacctacattctaaggactatggcttacataaaacagcatgggttggggcaatttccagcacactgctcactctcgaaaacgtatgatgcaggtgagagtaatgtttttgtttgaatctgctttcactcgtggaagatgaaactacttgcaaagatctgtactttagctattatgagtaacaaaagactcctaaaatattgcacacattgtggggatggagaaccatcatcctgggatttgatggatcctatggtttggctttgtgtccccacccaaatctcattttgaattgtaatccccacaatccccacatgtcaagggagagagaccaggtggaggtaactgaatcatgggagcaatttctcccatgctgttctcctgatagtgagtgagttctcacaagatctgattgttttataaggggctcttcctgcttcactgggcacttcttcctgccacctgtgaagaaggtggcttgctccttctcaccttatgccacgatggtaagtttcctgaggcctccccagccatgctgaactgtgtgtcaattaaacctctttcttttataaattacccagtctcaggcagttctttatagcagtatgaaaatggactaatagagacgtgtctctcagaagtcacagtgatgcttgaacggatccagagctccttcttcaggaaggtcccaactcattctgaagggtctctccaagcccacctctctctgtaaatgggaaaggttttactttgagcactaaaacctgccagaattctcaattttcctaacagtgtgttaataaacacctactcatttagtatccaaaccaggtctgtatttctcaattagagctcaccaggctttcatcataaagtagagcttcaaattgtctgcaatcccactcctatcaaaaacctagaaggaggtaatatttcagagtaatactataaccagatgaccacatctaagaaactgctgaccctacgatgtaaccttctgtccatttttccctttggaaagtctaggatcttttcttataccagcaagttacaagcctggactacactaacttgctttccgcagaagaaaacaccatgagttctgttttcatattaagcacttagtctccatcagacatcaatcgagaaaaaatcattaaaaatcacattttatatttgatgtatatttctcaataatcctatgtattagttcattttcctactgctatgaagaaatacccaagactgggtaatttataagtaaaaagaggcttaatggactcacagtctcacatgactagggaggcctcacaatcatggtggaaggtgaaggggtagcaaaggcatggcttacatggtggcaggcaagagcgtgtgcaggaaaattgccctttataaaaccatcagatctcctgagacttattcactgccataaggacagcacaagtatttagctccctcagcacagaaccatccccgtgattcaattacctcccaccaggtcactcccatgacacatggggattatgggagctacaattcaagatgagatttggatggggacacagccaaaccatatcatcctatttggatgatcaatattatcaaggtatgctcccctgagggggcgtcctttttaccatttaactccaggacaaaagtttatttctttgtaaggacagtgtttatttcttatggtcctattttctcctaagatccagacaccaaaatggccatctatcattgacttaactcctgaattttgcttagagtaacagatttagtgaatctaaatattttctggctgtggaatgttaatttatacatgttcaagttacctttgattcatgtgacagtttgtgccaaaacacactcattatcagaactcagatcattatgttggctcttgttttcgttactaaaggaagaaaaacagtttctcaaaaagaaaattctgatacctaggaagaccattatacctcactcttttctttatctcatcaccacatccaatattataaaagaacttacaaagtaaaaagaaaggtgttctgtagatgtagcgcctggcttgtatggtagcttaaatgaacacagctaaaaatattttatggctagtgtccaaaacagtctggcaccagacaaaataagaatatttaaaattatattttagagttactttaagaggaagggagagagagatgtaggcaggaggaggaggagcaggaggagagggagagagagagagagagagagagagagagagagagagagagaatctggggtttctatggaagggctaagaatatgtagaaaacagtttacaaagaaatatggtccaagaatcgtgtgtacacacacacacacacacacacacacacacacaccccctggaatatttttcagccttaaaaagaagaagatctgtcatttgtcccaacatggatggacctggaggaccttatgctaaatgaaataagccagaccaagaaagaaaaatattgtatgatctcacttatatatggaatctttttttaaaaaaggtcaaatatatacagatagtgaattaaacagtggttaccagggtcagggtagttgtgaggaaatggggcaatgtaggtcataggatacaaatgattaaaatatattaatatattaaaagatataatatacatcatgaggactacagttaataatagtgtgtattcaagatttttgataaatgaatagattatagctgttcttgccacagagtgaaaaatgggtaactgtgaaatgatagatatgataatgttctccacaatggtaactattttacactatatatataaatatctatgcatcttacaccattatgtggtatcccttaaatatatacaataaaatttattttacaaacacatattaggaatgcatattctgatttttaacaatagttaacctcattaatatatttcacactatcatttctagtgtacatgaaaagtagtttattgacattagttgtaaaaaaaaaaaaaatggtcttgagacttttgggtcagagaatgttctggccataaggtaggtttctgcttgcctactagatatcttaacttcgatttcctgaacatcccatcacttcagaatctctcaatcctttctaacatccgcaacattgtttttctttctgcatttcttatattgactgatggatttataattcactttctctgaaaaaccctgcagttatcatatatccctatccattctggctctttattgcccaaatctctaccaaaatcctgtcagcacagcctctgaaatatttctcaaagcatttataatctggctctcatcaacattttcaacactctgttttatcattccactattttacatcatttcattttcatttttaccacaatcactcatccaacaaataagtatttagctccctcagtaattagtattattattattaattataactagatgctgagcatacagaagtgaacatgacagacataatcccagcagggatgtcagactttatgcaagtaatcaaccatgatgaatctcatgagattctgagagagagagagagagattgagagagagagagaaaggggaaccactggtgtccgagttagaaatttgaattagtatctgggtcaccaaaagcttctgtgaagaagtgatatagacttggccacacaaaactaccgtgaaggtggtggaaatttttctatgcagagtaccacatttaaagagctaagcctgagagtgtcagagataaaggaacagaaagaatgtgacagcagattatgtttggaagaaagatgttcaagagaccaagctaaagaggagatggggctagaacctggagggtccttcgggtcctgttgggagttttttctctgcccagaagggctttgtcacgtggttgtcaggaaagagtcatgattagagctttgattcagagacttctttcgctgaagtgtggagaatggttcagagagaagcaaatctgaatggacaaaagaggttattattgtaatcttggcaagaagcgatggtggtcttgactaaaatagttctagtgagaatgtgacaacaaacctgagaaaaatacaggagacgtaattgacgggggttagtgttaagttgaacgattgcagagttgaatttgaggaaagtgtcatatatcattcccagtttctgatgtcatacacctctggagataacactgccatttcttttgaaatgggaaaataataagtgatcagtaagtacgtattggataaaataatgaatggttaaatgcataaggggagaggaaaagagttgcagagaaagagagtaaacgtattttggatgtgttaattttgagatacctttgaaaaatccaagtgaggggttgggtagtcagagaaatgaatgtggatgtcaggacgaaaggtgaccgtgatgaactgtatgtcttcctctaagcacgttatacagcttcatgtcacaagtgactcacttcatgtcacaagtgactcacaaggtcacttgtgacaagcatttgcctggtgcttcatccctaacctccctttctatactcagctaaaatgtcacctacaatacttcttccttgactccaccgtccccactttactgatatgaatacattttaataaaatgatataataatgcttagtttgtaaacctaatgttcctcaagtggtataattatctgatttgtatgtgatcatcaacccaaccatattaggagcaccttgaaggtagaagatttaggttcatgcttaacaccacatctggaccactgtggatttaactttctacaatgattgtattcattaatatattgggtgcccactatattccaagtaatatcctgcacactacgtacaaggaagcataggtcccgtgtgctcatgaaactgtaattttagtaagcagggataggatacaaactgagaaaggaaaacaatttagaaagtgggaaatattatgcacagaattaataaaaaagagaaaaatcttgaaaaagtcttcaatacctcacttggaaggtgattttgaagaagaactgatggacaaactagagtcagccatgtaatgatgtaggggcaaagcattccgggcacaagggacagcttatgcaaagaccttaaaaatgaactagctttgtatgttggagaaggataaagagaactaaggtatctataaggtaattaggaagaggatgagttatttagtcccttagtctttgaagcacattatctcatacttcaattgagtttattcttagtgtcattcttctggatgcaatatttgagataaatgtcttaatgaacgttcacctccctccgtagtaatgcctgagtgtcacaaaaactttttttgtttacatacgtagccatctaatggaaacataaaataggaatcaaaagttgagtttcatgtacaaaaggtaaggactgtacatgtggtcataacaacttcaaaagcacctgaaggtaacctttaaggaagatacaaaggctaggaaatatctaggatccatgaagacagacttacttaaggtcatagtgtgtccagagttggttcccgccggtgggttcgtggtctcgctgacttcaagaacgaagccacggacctctgcggtgactgttacagctcttaaaggtggcacgaacccaaacagcgagcagcagcaagatttattgtgaagagcaaaagaacaaagcttccacaacgtggaaggggacccaagcaggttgccgctgctggcttgggtggccagcttttattcccttactgtcccctcccatgttccatttctgtcctatcagagtgcccttttttcaatcctccccacgattggctacttttagaatcctactgattggtgcattttacagagcgctgattggtgcgttttacaatcctcttgtaagacgggaaggttcctgattggtgcgttttacaatcctcttgtaagacagaaaagttccccaagtccccactcgacccagaaagtccagctggcctcacctctcaatagcattaagaatatagtttcacgagcatatatgaatcaaaacttacatttgccaattttatttgcttgtttatgtgtttccaacatgtcttgtcttagggccaaatgtttccctagagaataactattccaactatcttagttgctgtatttttatgcaaccttcaactctccatactaaaatgtctccagaatagaaaataaatcttttcaaagtttcaaaagaggctctctatatattccccttaaaagtaccaggcagacatatttctaggtttctaacattgcgtgttgccaggaagtatatccaaaccatcacaagttattcatgtaaccaagcacacttattggagtgcttctgcttctgttcttgcttgaaattggaagctccttccaggaaaaaaaaaaaatatctatagaaggggaaaaaagtaattttactttgaaaataaaatatacgtgagcaatagttttattctgtttttaatttaccatagcttccaaagacaacattgttttatagtaggggttagcaagtgttttctgtaatgtaaacgtaaagggccagagagtaaatattttaggctttgttttctatactctgttgcaactattcaactctgctgttagaatgttgaagcagtcatagacaatagagaaatgaagatgtgtcattgtgatccaataaaactttatttacaaaaatggcaatgggctagttacggcttgagggctgcagtttgcagactctcacttcagagctaacagttgttgtcaggagtcacttgtttttggaaacctacaatgaggtactataacaccaaaaagagttatcccttcctttttctctctcactttttgaattatgagaagaattagaaatgtagttaatgataatgtccaaccagtgtaattatacttgttagaaacacagctggaagcctgttgtccagtcttatttctcctctgtgatcctcattttcagaggttgaagtcataagtttgccatgtctactttctgacaggggaattataataatgtggagtcaccttttgtttgtgactttgacaatgcttcattgacttactcaccaattttctaatttttatgaagactttttgccgaaatgtagactcagtcttctctcttgtctactctttctataacaattaacaatgaacttatttacctttttaacatctttttaaaaattttctatacaccttgaaaatgtgaatacaaagtaatgctgcatcatgtatattgccttattcacacatagcctcttatggtatatcatataaaaatggaacaatacagcaacaggttgaatgaacagtaatcaggtaacaggaaaatgagatgtctttaatatttcacttaaaaactcaatttcctaaagcatacatataaatatttggaagtatagttagaagaaaaatatctttaaaatattttaattgattagtcttatttataagataatttttaggaggctggttgcggtggctcacacctgtaatcccagcactttgggaggccgaggtgggcagatcatgaggtcaggaaatcgagaccatcctggctaacacggtgaaactccgtctctactaaaaatacaaaaattagccgtgcatggcagcgcatgcctgtaatcccagctactcgggaggctgaggcaggagaatcacttgaacctgggaggcggaggttgcagtgagccgagatcgcgccactgcactccagcctggtgacagagctagactccgtctcaataataatcataatcataataataatttttaggaagcatcagaaatatataagaaaaagattattttcttaattgctttactaaaaacacctctatgatttttcagtaaaacttgattcttatgtcatgtgtgagtgtgatctgcctctcttgggatactactgtactcatgaggagtgatttttttctccaacgacctctttgtcacgtcaacaggtcacaggaatagtgtaccctaaaaagccacctgccacatgctgctgaaaatgtaaaagtacacacatacacacacacacacacacacacacacacacacacacacaccaaaatcaggtatcacaagctgaaaataaaattgagtccaatttttttttaattgagcagttaatgtccttaaaacaaaatcctatactgcaacaaatacttagccagatcattctgatacctccaaactgtggtgtattccaagatacctctatgatctttgatttgatccacagcttttcagttatcatgcaaataccttcaagttttatctcatttctcagtgcaaactcattaaaaattttcagctgaattcaattttataaacatgttgtgaatgtcctctttatataagcaaggttgtaaggaactggccacataaacagaaaattgaataacatatggtttctggccttagtgatctcatgtgtgagttaggcatatgggcaaaatcagaacactatagagtataagtctaaaatggtagtattttataatagaggatgaagagggtgctgtgggatcataggtgacagatataactcccgttgtgggacttgagaaaggcttcacagtctggaaacatttagttgctattgaacacaaaataagactcactgttgagagaagggagagggagggcatttcaatcaaattaagattctgtggcatattcggaaactgatgtttttaaaaagagtaatgtttattacattcctctacataaattatatttctatgtaatatgaatgacaaatatttaacacaaaatgccttataacatttgaatgaaatccatcatatgacctgttatctatttccatttcctttttgctcatatcattatgaacaatgacctgataaattttttataagactttgctgaattagtaaaggattattaagtttagaatgaacaaagctgaccaatcattcaggcaaatttgaccgttttgttgtcgcttttcttatttctgaaaccatacaattccctgaaatgaataagtacatatttgataacttcctaaattaaggctcaaaacactggtaatctactgggctttcatttgttccttctatttgtctaatcctatctatatttctttatatgagctatgaaaatattagatttattaagttgtcctttatcttaatagagaagaatgtttttctatgacattaagaggaatttgatttttttctttaatgatctacttttaattttggtagagtagcattgataagatcaatattacacattgttaagtatgcattacatgttgataagataaatattacacttaaaatatgtttatcaaatgtatgaatgataaaaacgaattctgaaatgtatgggaaagatcttgaataaaggtctatgtacatttcaaggatgtctacatatgcaaattatcataatataataactattgaatatgattatcttcacatactttctttatttttcatctcttagatgaaattgggtattgttttcttatagctggaacaaagcattacagagaattcttagtgtgatttcattgaaactcactgttatatgagttcaacaaagtttaaattagtccatgacttaatcatcctttataaatcctatcactagtattcggtaaggacaaagtcaattaaaaaattagcaacagaagcattaaaagaaggattaataaatacaaaataagggatgtgatatctttacgtattgctgagatgttagtgctaaggaaaaacttccctgttcataatgtgaggtgggaaaaagaagaactattattgtatatttctcctctctaaaactgcctatctgactgtgtttttctgtgtcagccgtattaacagatgtttaattttactcactttagtatataaggcatcataatgtatgaactatttcaaaggccctatgatggctaattaaataaaaatatattaaatattagctggacaaaataaaatatgtattaattttggaaaaagtagatcaaggttttgcagatcttttcatatcaatatattcatttgctgaataagcttttattgtttaccaatattactagttttatagagatgtagatatcaccacagtatgactaattttatagggacacagatagatagatgttattttattccaatcttatttttacatataacaggtataaatatgcgcttgaaaggagtatatcacttaggagtcagtcagaaaagtaaagatcttctagtctaatacagtggttctcagccaggggtgattctgctgcacgctgagggataaattggcaatttctggagacatttttggttgtgacaattgcaggagtgttactggtattcatttggtagagacagagatattggtagacactgtacaggacacaggaaagtctcttacaacaaagaattattctgtccaaaatgtcagttgtggtgaggttgggaaacactggtctggaagaaggaatttactatgaggaactagttacgaaagtatagagacatttaacaagctgaacaaaggatagtgagatggctcagagattagcaactgtggcatgaagccactactacgtttaggtaaaaataagctaccatttattcttatagtaataataataataattattattattattatttgagatggagtttcgctctgttgcccgggttggagtacaatggtacaatctcgactcacttcaacctctgcctcccagattcaagcgattctcctgcctcagcctcctgaatagctgggattacaggtgtgcaccacccctcccagttaattttttgtatttttggtagaaacggggtttcaccatgttggtcaggctggtctcgaactcctgacctcagatgatccatccacctcagcctcccaaagtgctgggattacaggcatgagccaccacacctggcccactctttcttttttaattattgagaaatataaaaatatgtcaaaagtaacaggtgtggtggagttacagcatgcacataatgggatacagcccattatctaatctcagatggaaactagaaaaaaaagagaagatctttgctaaagcacagattatgtggaaaatcatttagaaaaatagcttatcacaacattaaaattaaatcctttagctgatcatttttccttgctattttttcttttaaaattgagaagacagtgagttttttttctttattgtcattatcttgatgtcaaaaaataatatgcacattataagtgggaaaaaagataagtcgaaatgaaatgaaacaatgcgaggaaaaaaatgtcacaacactcttcaattagaaaaaatgacccccatctttcctccaaatagaaatgacgtaactgaagtagtggaactttctcttccatggcaactctagagaaggggtagatggcatgggattgtggacagatggacacagaaagaggcctcatttattgttattgttaaaacttttacttctagtaatagtgacacctccttcagcatttctttatcaattgtcaatattttttggatcaccagcatcaccttctatatgtatgtctagaaacctcctgttatgaatttacacttctcagagtcaagacagaaatgctgtgaattgggcgataaataaaataccccccttttattgccttgctttgtctcttaaagaaagatgcctgttgggggactatgagaatgctttgtgcttctggacctcaagggacaaatctataataaaaattatgcatagtgatgagaaatatatataatgcaagtttgtagagatcagttaacttatcttgtctaggcaattatttctaaacaatgatttcaaatcattaactataatatagcccattcataccctccatttttgtcaaatccctgtcaccttcaaggacttggccatcccataggctgctctgcttttaatagaggaagatgctgtaactcttggtaccattgccagttatgaatttatccattaatgaacattgcatttaaggcataggtttatctccttctccaggtatgaacctgcaggattcctacctgaagcttaagggagaataaatccacctgggacaatcaaggacagatcaaccaatcagctcaaagcaggtgtgaattacacagtttatttgagtgacaaggtagctaaagcagggataataaaagaagggagtgggttgatgtggacagacgaactatggctttaggaaatttggtagggactgaaacatattttgtgtaatttatgtgggtctaatagcttttgaaacttgtttacaagacctgtgtaagtggtactggcatattcatgcatgagaaaacatcaagggaaaacttaatagttcaaggaggtgacaaagaagagaggaaccaattattttcactagccgtcaaaagcaagaaaataatcagcttgagcccttcggggaaaagataggttaaatattaagtaacagtttgttattattccaagtgttttcttaaagttgctcccatactttcctgttttctctgagggaatttagtttttttgttggtttttttttttttttttttataactgtcattggtcagagcttgatttgatgccagtcaaatttttttaaagagattatgaaaactgcttaaactcttccaaagggaagatgggtcattcttaacatgtgtttcaagaggaagagcataagagcattatatggtaaggctgaaagcagatatcagcgtttaggggccatgaagaggtagagctcacattggtaggatcattgactagaattccagagatcaaaattgtatgttagtctagcattggggaggacttgtagctagtatcttcattctagcttgggagcctaggaatcaggttaggcatcttgcacaggaatgggccgatgggctaaaatctccttgagagagatgattaatccaggacaaaccaagcagtcatgccaatgaattactttaacagggtacttcatatcctcatcctttgggcagcacggtcttcagagatggggcaggccccaggctgcagttgagattctataaactaaggtcaaaaagatgcagcagtgaagaagtcatgcttatcttgtataaatcatgttttcttttctttttaatgaaaatgtacatttaacacattttaaaactaaatattgaccctaaaattccaaccaaaaaatgctacataagtggtatttatttttgaatttccctcatgctcctcccactgtggggacaaggagtggtggtggaagagagatcttttagcaaacctgtgagtagagaattagaaggtaatgggaggaaggtaaaaggaaaacatcatagatggataggctcacaaacattaaaggccttcgtgcctgtccttcatgcctattcatccctctccagtatgtgaatcaatgtacttgttaaatattcattcacctcacatatttagcattaaccgtgtatcagggacgttgttagaccgttggtttacgatgatgtgtaaaatatcatttgtaactcagactaactggaagtgctcaatataataagatgtaatgttatggaacactaagtctgtgctgaagacttatctcctttaatcctaaaacaatcctggtgggtagtctcaatgatcatctccaagtcacagttgaggaaattaaggcttcaagaagttaagaaactggaccaacatcacaaaggtagcatcagagtgacagtttgatttcaaagtgtacttgacttcaaggcccacatttccttgcacgtttaatattgcctttctcaggtaaatataccattaaatgtgatacaactctaagcatttgaattacttacaacgtgcagagttaaaaccagcattatttacactatacttcagctcgtttataagtgaactattattttgtggactaacctatgaaatgtaaccacattgaattcctctgttaggtacaggtttggtgattccagggaatagagtatgactgaatgcacaggtaggggtgaagtgaacccggtcagaaaatttagagagcatcgagcagatcattaagcagctgtctttcaaatgtgcagaacacaactcatttgtaatctagggactatctgtattgattcttcccagggaagttacttatttttatacatatgtggtgtgttctgtccataataccattctacatggtaatgctcaactttattatttaaaaaaactgctaataatgaggtttttctttgtatcacagaagcagcaggagcaagttttctttttccttcccagtttttttaagtactgccaaggaatgtgattttgtcagacttgtatttcctattaagccaatctgcatgactgttccttctactagctttacctgttcactcatttattaattcatcaaatatttgtagagtgactattgtgtgccacatactaatataggcacaaggataaccaaaaacagacaaacgctgtcctttcaaggagctcatatagtaatgggaagttaggaaaggagaaaataaatatgtggtatttcaaatggaagtattaaagtgttaagaagaaaagagaaactaacaagatagggaaaaagtgacaggaacatgatgttttattttttatttatatatattttttgagacagggtctcattctgttgcctaagctggtgtgcagtgacgtgatcatggctcactgcagccttgacctccctgggctcagatgatcctcccacatcagcctcccaagtagccaggtctacaggcatgtaccacgatacccagctaacacgttttcttttcttatagagacagagtctcactgtgttgcccaggctgttcttgaactccggggctcaagcagtccacccacatctacctcctaaggtgctggaattacaggcatgaaccaccatgcccagccgaaattgatgttttatatatggcagtctgggcagacctctttgatgtgatatttgaacagaaatctcaagagagggagtgtattagcccgttttcataccgctagaaagaactgcccgagattgggtaatttataaaggaaagaggtttaattgactcacagttcaatatggctggggaggcctcaggaaacttaaaatcatggcagaaaatgaaggggaagcgaggcaccttcttcacaaggtggcaggaaggagaagtactgaggaaagggggaagagacccttataaaaccatcagattttgggagaattcactcactatcatgagaacagcatgggggaagccaaccccatgattcaattacctccacatagcctctcctttgacacctggggattatggggattataaggattacaattcaagatgagatttgggtggggacacaaagcccaaacatatcattttgctcctggcccctcccaaatctcatgtccctttcacatttcaaaaccaatcatgccttgacaacagtactccaaagtattaattcatttcagcattaacccaaaagtccaagtccaaagtctcatctgagacaaggcaagtctgttctgcctgtgagcctgtaaaatcaaaagcaagttagttacttcctagataaaatggaagcacaggcactgggtaaatatacccattacaaatgggagaaattagccaaaatgaaggggctacaggccccaagccagtccaaaatctatcagggcagtcaaatcttacagctctgaagttgtctcctttgactccatttctcacatccaggtaacactgatgcaagaggtgggttcccatggtcttggtaagctccacccctgtgggtttgcagggtagagcccctctcctggctgcttttacaggctggcattgagtgtctgcagcttttccaggcacgtggtgcaagctgttgatcgctctaccattgtggggtctggtggacagtggccctcttctcatagctccgctaggcagtgccccagtggggactctgtgttggggctccaaccccacatttcccttccacactgtcctagccgaggttctccatgaggtcttcattcctgcagcagacttctgcctggacatccaggagtttccatacatcctctgaaatctaggcagaggttcccaaacttcaattcttgaattctgtgtatccacagactcaacaccacgtggcagttgccaaagcttgggacttgctccctctgaagcaatggtccgaactgtaccttggccccttttatccatggctggagtggctgggacacaaggcaccaagtcctgatgccgcacacagtggtggggttgggggggggacctggtccacgaaaccatttttgcctcctagacctctgggtctgtgatgggaggagccgcaatgaaggtctctgacttgccctggagacattttccccattgtcttgcctattaacattgggctccttgttaaatatgcaaatttctacagccagcctctccagaaaatgggtttttcttttctactgcattgtcaggttgcaaatttttcaaacttttatgctctgtgacctcttgaatgctttgctgcttagaaatttcttctgtcagataccttaaatcatctctcaagttcaaagttccacagatctctaggtcagggtcaaaatgatgccagtctctttgttagtcatagcaagaatgacctttactccagttaccaataagttcttcatctccatctgagaccacctctgcctggacttcagtgttcgtatcactatcagcattttggtcaaaaccattcaacaagtctctaggaagttccaaacttttccacattttcctgtcttcttctgagcctcctaactgttccaacccctgcctattacccagttctaaagttgcttccacattttcaagtatctttatagcagtacctcactacctcagtaccactggtcttaactcctgcgctcaagcgatctgcttgcctccacccctaaagtgctgaaattacagacatggtccattgtgccgagccaaaattgatattttatgtatgacactctgggcagacctctatgaggtgacatttgaacagaaatctcaaggaaggggagaaattatccatttacatatttggggaaagagcattccaggtagaagaaacagaaaatccgtagtcttgaggaatgccgtgtatatgcagtatttttcaaacttgttattttgaaatacatatacacttacaggaagttgcaaaagtattaagaaagatcatgagtacccttcactcatcttcagctaatggttacatcttacataattatatgtaatatcaaagccaggaaaccaggaaattgatgttgatacaatctatgctttattcagatctcacatcttacatagctatgcacaatataaaaaccaggaaattgatattaacacaatctatgccttattcagatctcaccagcttttacatgcacttatctgtgtctgtcattctatgcaattttataccatgtttagagtcatataacaactacccctattttgatacatggtactgaatagttccagcgtcacaaaggaactatctcaagccaccctttaattgtcacacccatccaatctcccattctacttcctgaatcactagcaacccctaatctgttctccatctctatgattttgtcttttcaagggagttttctaagtaaactcatttggggaaagaaaggagatgaattgttctagccacggagtggagaacagagagtaagagtacctattgaagcagagggagtcattgcaataattcaaatgagaaataatggtgattctaaaccaggaagctttcagtgaaaacaatgagaggtacatggattctgggtatttttggaaggtagcactaccaggtttgctgatgaatggggtatggggtgggaaagaaagagaagagcccaggatgagtccaaggtggataaggtgaatagaattgagaaaatggtagaaggatcaagttagatggtagaggggtaaaggtggaagcaataattttgttttggaattgttaggtttgaaatcttgttagacatcccagtaaagtcacaaagagtgcagttggatgaaagtatgggattcagggaagaagtatgtgctagagatgcagatttgagagtcatctgtgtggaggtattattcaaattcaagtccccttggaatgaatggctattcaggcagggtcttcataaaaatgcttgttgcatgcctgtaatcccagcactttgggagtctgaggtgggtggaacacttgaggtcaggagtttgagaccagcctgatcaacttggtgaacccccatctctactaaaaatacaaaaaaaaaaaaagttagctgggcgttgtggcacatgcctgtaatcccaggtacttgggaggctgaggcaggagaattgagccaagattgtgccattgcattccagcctgggcaacaagagcaaaactccgcctcaaaaaaaaaaaaaaaaaaaaaaaaaagcttgttgcttcaaattcatgtcagtctgtaaaattatctgggaaggcagtacaaaaactgtcactttgactacgatgtttctggtgacccatcttcattgatcagtatggaaaaggcatgtctctgaaaatctctgagagtctttgatacagcaagaacataaggataaatcattcttctatgttcatggttgtagaggatcttgaatgtttaatggcagaatagccagatcacactctggcacttctgtatgagaggctgagggatgttactgattcaccccgagaaatatttactactaaggggacagaggcaaaggggatacaagacttcaccctgagctgtagcgctccctccttccctatcctgctttcattcttcacattgttttccttctttcttttttattattatactttaagttctgggatacacgtgcagaatgtacaggtttgttacataggtatacatttgccacggtggtttgctgcacccatcaacccgtcatctaggttttaagccccacatgcattaggtatttgtcctaatgctctccctcaccttttccctgtgtccacattgttttctttctttttgaagcctctcattcactaggtttcaatcctgccttgctagtgttctaactctaaggcctaggcaagttatttcaccgaacttagcctcagtgtcctcatctgcaaaatggatagttttatgatatcttcagcccttaaagtcaatggttctgacagctagggtgtactatcttcttggatatcagtcatctcaagcaagccctccttttttggaccttcttttcacacacttcacataccttagagaacataatacacatcctctttactcagggcttattctttataacaggcttcctaattcaattaactcaacttttcaaaaatattagtgactactgtgatgtaaataaatttgcattttataggggtcttagtaacccagaagggagtggggaaaattaatatatattgagagtttattaagtgctaggtactgtaaatattttcttgtatttaatcctccgagtaattctacaacaaagatattatcattgctattatgtaaataaaagaacaaagtagaaagaaacccacggtcttgtataagctcccctagttggtgggtattgaagggagtatttcaatctttggtagcttctgagtttttgttctctcagggaatctgccagatgtccagggcacctgccaaaccctatgaggctataagaaaaccattaagggtcttagattacccagctttttgggagttagaattctgaatgaaatttagtgttcctgcagctacaaaggaattgagttagggaagtgatgactttatctttagctacattggttattttccttataataatcctggcttggtagattagaggcagcccgagtaacccagaatcgctaaaatagaagtgcgagctcattgcccgctgtccttcactatgtttgcatataggaagcaagaataaaacaagcataaaataggctaactagcttgtcagagctcttcacaccaagtctttgtgagttccaataagacactgactattattaaaaagacagagactccacataagtaggaatttattgttttccttttcagtcaccaaaggacaatcctctgcataggttagcaaaaaatggtactgatcctataatctctaatattaaagtttagatttggcaagctgtacatcttatgttgttcattaacaaaaaacaatattgattggtatcttgtactataacttgtactgtgggtcaaattccaatacagcaaataccattgcaataacaattctacaaaactacatcaaaaaaacctttcatgtttgagccaacagcctgatagtgctaaggactttgagtacagtatgctagaagattcttaacagttatttgtcctggacaacaaaggttgactccattaaaaacatagccatcagtgtgggattatttccaaatcaagcttttggaaaagtcaaatgaaagtttgcaagcaggtggggcatggtggttcatgcctgtaatctcagcactttgggatgctgaggcaggcggatcacctgaggtcaggagttcgagaccagcctggccaacgtggtaaaacccccatctctactaaaaatacaaaaattagctggcttttgtggtgcatgcttgtaatcccagctactcaggagcctgaggcacgagaatcacttgaactcgggaggcagaggttgcagtgagccgggatcatgccactgcactccagcccacatgacagagtgagaccctgtcttcaaaaaagcaaaaaacaaacacgcaaacaaaaaaaaaaaaaaccaaagttggaatgcaataaatgttcattgaatgaatactgaatagggagtttcagctaatccactcaaaatagtgctgaatttccagctctaaggtcaatgcttggcatatatatcctgaaggaatgaatggacacagagtaattttttttctaaaatgcaaattcaattatgtcacttcccttcttaaaatccttcagtagcttcccgtagcctccagcatattattttgaatagtgcttctcaaactttgatgtgcatcagaatcacctggggattttcttaattaactgatgctgattcagtaggtctggggtattgtctgagattctgcatttctagcaagtgctcagggttatagcaatgattttggcctgcagaccatactttgggtagcaaagacataagccacttaacttgacataaaagactgtttagacccttagtttctctctcgctctttccccattttgagcttttgctccggttcatgtttttccctgaaaataccgtgatcttacattgtctgtctggatgctgaattttccctaattctgggcctccatgtagttttaggtttgacatcacaaccaccaaaagatttccccttctcccttaatcttggttaatgtcactctcatgtattatactgttaatgaagcattgaggacataaaacttatcaaatattttatcacaatcaatgatggcaccagtgataacatccaaatgcctgggtgagtaaataagaggagaataggggacttgttgttaaactaagtttgcagagaaaaaatgtactgattataattaaattggatgtttatttgttatgacaaaaaaggagctagagtcttttaatccaccccttggcaccactgcttatctccttgtaacatacgtttgattcccatgtctatttcttccatatgggaaatttcagctccctaaacatcaccaatacaacctgttgataagacaaagttaaatttattgcttactatggtaagaaagaccacagcctggacaaagctttggtagtatttcataaggagaaaggtgaggttggatttcattgggagtatgaagcttggtttaagattggtctttcactgtgggggcacaattaggattgggtaaggatcatggtattacaacttagtttggtggaaacagcacagtgaagatttctagccaagaggctcagagactattaaggtgtgaactctattgatgttttttgttgaagagttgatgggagtttggggaagttactttagtgaacagtcaaattatttgcctggccaagagttatctgtaataggaaagttatgctaatgaagacaatggaaaggtaaaccatgttaatgtcgacagccagctatgtgagcataaggggtaggtagctttggtcctccatgtccaaactgtttgtagtggtaagtgatcttcattctcacatagattgaaagcttcctgaggacagggcaatgtctttgtaaactttaaaatatctatgtcctgcacatcacctgccgtagacaagcatctagtaattgacggttgggtagatactgagggaaaacatgcaccaaataaaaatggcaataggacacaaattcactatcatttggaagaataacagtgttttccactgatatttgctacacacagtggggtccacagagcagcagtaccacttgggagcttattggaaatggagactctcaggcaccaccgcaggtccaatgaattaaactctgctttttttaaggtcatttgtattcaattattatttttttcttttttctttactttcgatgcatttttctttatttgtttttgagatggggtcttgctattttgccgagtctggtcacaaactcctgagctcaaatgatcctcccacctcagcctcctaagtagctgggatcacagatgtgagccaccacacctggcttgtatcacattaaattttgaggagcagtgctttaatatctattccattctcatcacttgatgaggtattattaattccacttatggatgtggaagttgaagccagaaagtttaaatgacttgtacaaggtcaaacagcttacaggtagttgagccaagaggctctcaagtcttctgcctccacaaacccctgttcagctgctgccctacaatggaataaaatatactaatcccagagggacaaatatgctaaaaatctcaatattatacactttggaaggtgcaggtgcattatctttcaattctaatttctctttcaagttttctgatgcataaaaatatgaacagcaggtctgagcaatgtttagatgccgtgctttgatccttttgccattcaagatgtttgatttgcattctgccaaggaatgtctggtaacctccatgatgcagaccacaccattagtcaagagagagctgacgtaccttcatctgagagctggctggctgtgagctgctcagagggaaaggatttctatttacaaattgtatcgattatttataaataaaagttccccttgctttcttcagttgtaaaatctgcagttagagagtcgggaagaagatcaaaactgcatacatttgcatctgccaagcctgataactagttccagaattacagaaatggtgctgaaatagcacctcaagtaccaggctctatcaaatttaatctatccataaggcaactgccaattatattttagagaaaaaatgtagactgaaaagatagacaatccaagtagcaactcctgtaaaattatatgcccataggagcaatcttgaagatataaatattggtatgtttctccttcatttatcatttatctgatcatttgacaagtatttattgaatgcctgttaagggtgtagatatatgtggtgaggctgcaggtgtaagtaggtctttctgaggatatgcatgaagttgatgttcataacttggagatgtgtgtatacagactgaggattccttcagtggatattaagaagtggagtaataggcagtaaagaatacactagtcagttgtggtacataaacacgtcagcaccacttaggtattaacttcctgttttgttttgtgtgtgcttaattacgctgtttattaaacaagcacatcataatctgcagatattgtcataaacagcacaataaagcctgccacatcagaatgtcatctatcaaattaggtgtgttcctcagctgtcccgataggcacacacctgtgcctgtaaataggcgcttggcggagattgcttccaggtgtggatctgttgggcgaccttgggatgtagggcactttggaaccttttcctctagcttcaggaattaacctctgggcttggttccatgccagcttgcattttgctttgggacagtaacatgtaaagaatatgcctgtgaatttagggttactgagaagtcctcatagaagaagtaaaatttccttgaggaatgggagtcttttattcaatccaggtttaatgcaaggcttggtgaacagctccagaaggttaataattgcgtgcgtgtgtgtgtgtgtgtgtgtgtgtgtgtgtgtgtgtatccttttgtcattcaaaagtatacgtatacacacacacctgtacagctgatgataaatatacattgtatcaatgagttcaaatgaagtgtgctattcattcactgaggaatgggctattataatgaactattatgatattagaaattgtcagggcaataagcaaataatacatacggttttcaacaaactttctaagtattgttatcagtgggtttgcttaaatctttttttacaaatttatttatttttttgagacgaagtctcgctctgtcgccaggctggagtgcagtggtgcaatctcggctcactgcaaccactgcctcccgggttcaaaagattctcctacctcagcctcccgagtagctgagattacaggtgtgcgtcaccatgcccatctaatttttgtatttttagtagagacgggttttcaccatgttggccaggacagtctcgatctcttgaccttgtgatccatctgcctcagcctcccaaagtgctgggtttacaggcgtgagccaccgtgcccaggcaatagccccattgctcagtgaatgaatagcacactttattttaactcattgatataatgtatatttatcatcagctatacaggtgtgtgtgtgtgtgtgtgtgtgtgtgtgtgtgtgtgtgtgtgttgaatgacaaaaggatacacacacacactcttattaaccctctggagctgttcagcaaaccttgcattttttactttcattacagtgtgtaaataatttagcaaattctaatttgaacctgatatcaattgagcatttaatatttagccaaatatttatcaagtgctgactgtgttctagatgctggggctgcaatttcgaaacagaccattgaggccctcatggagctcacaataaatgatcttccttaaagtatcaggtctctggtttgttaccgtattttttaaattgttaaggaaagaaaaaggccctatctttttgtagacaaacatgccctaagtgcttccagaaataatctccatcaggtaatgcagactgtgtgtggagtgaaattgagtccaatccatgatccagcagagtttcagcccaggatttctttagagcctttgctacacacaaagttggctgatgtgccattcagcatcccagcagctctttctcttcacactagcaatggcaaagctttgtgcggaggcattgctggctgctctgaactaaaagcatccgtggggaccgaaagaggtttttgcacaccttattaaggtaggcaagtgtgtctgagtgtgtgtgtgcctaaaagctggaagacatctgttgagaggaaagtgctcttctgtgggtctggcagcttttctgtaagtcttctattctgatgcaggagcgtgtgagcagtgggtgggaggagatgctttggtacttggaatgctgaggtccggattaagtggtattgtaatagctagttagaggcagaataaaaagctgggaatcaaagcatttaaaaatgcatccttccattatttgctctcaagttaaaccatattcattctaggggaaattaaaaaaaaaaaaaaaacacagcaagggcaagtagcccaaatctgtaaggtctttgagcttctctgttcgtccagcttttgaagtcttcctacagccaatttgtttggctcctctggagggggcaattcatatccacttccctctcctggagcatttctttcttctatactccatcagggaacaatagagtttaacagtaacaggcaattttttttttttttcaaagcttgtgccctcttctgcgtttaaaggtgttttttaagagactcctgctaggggaatcttggcgcctgtgtgttaagacggcaattaacttttagtatcagtgcttacattaaattttctctctttctgctttactaaagcagtcattaaaattcagtgtgagtaccatgaaactttatcataaaaccctgctttgcttagagaaccttgattgttttctgaaagcagccttctcagtttatatatacatagctgccttccttggaatatcaaattgctttgtgtcacattaagaaacactaggttgaacctctatactgtgttttatctgagaaaaatactactgcaaaaagtttgatttgttcaagttttaggatgaaaatttctttgtaacaagttatttgagttgcatactatgtcatcgtatatctctttagttcaagtaattttgcaattaacatacggttatgtaaagaagataatgatttattttttatttatatttttaaaagttattaagtgaggttttcctttcagtaagagtttagaaaaaatagccagaacaagtaactggacttggaagataaagatacctttgcacttctaaattttacctttgtacacttcggttgtgatttaatcattgaaatgcctctgctttgaagtaaatgcatcacttatggtgtatgctgtgttttaataaagggaaaacagttatgggttctctgttgcacatttgaatgttgttattttttgctgtatttaataacctcttttttctcttgtgaggtttactttggaaatgaggcatgttcaaaaataggctgacattcagcttctatgttttaaatttaaatgctgtctgtgttttatcacatctggaatgtgtggggagaaaagataccaagttttattatttagatttaattgtagaattgcagattgatatttttcaatgcattttcattatagtttctgccatggaggcagcgtgagggctttcaggaagatggagtggtgtaattaccaggtgcgcacgttcattaatccttcctggctagagaaagcttcaagttcttctccagtggcccattcgtaaagctataaatatctaaattgtgtcagccaagaagtcacacagaatggtggctctttttgagttcaatttcatgcactgttgctttggtcttgtgaggaaagctctgaattccttaggatagtcttggttgtgaagttccaaaaacaaaatatcaaatcattaaggatttaatttaaaatacatactcttctttcacaaactagatgattgcagtaatgtggattataaatttttttttttgctttatttctttagagctcctctttttattttgtatgatcaagattatagctgagattttggtgatttttttaaaaagatttatggcttatggtccatcagtctctccactacttcaaacctgtgtacccctgtatattatctgcagtactggaatgtttgcattgtatgtggaagctatatacgatttggtaaaaaataacacttaaaggtcttcgctaagagtgcttatttaatcattaaatatcccttaataaaaataattccagagatattgtctgtgtacaaacttaaaaaaagagaaatataaaatactgtgatgtgaataaaatgtatagcaatacactccaataataccattcttatgttttcccttgttctcaactgaaataactaagctaatagagacgtcagtaaggaatgtgttgtttcttcataatacaactacaaactcatctgataagaacaacctgagagtgaacgttaactttcctcattagaaagattcaatttaacacatatatacaaatacatttttaagataatgatatttgcagagtttttgtattctatggagtaaaggagaattatcacatattcaaagtaaaggtataaaatacatcttaatgttttacttaaattttaaagggtccaaaatatactaaaattgtttttctaattctttcctatgtttaaacgtgccagagtcattggaaataggacattctttttcttaagaagattttgcccaaaatatttaaaactattttcttttcccttgattttacaatttcaatattcatggatttttctactttaaaaataacagtagtttttatgatcttaaaacaaatgtttaagggcactttcgctctctggagactataccatccacatatttattatcagcaaaagaaagggcagggcatacttttatttgaagttgagtataaaaatgtgtctgtgtgtgagtgttattaaaaagataagtgaagagacaaatatagaatccaggaacattttcagcctggcttttactctctctaaaaatctaatgaaacccttgagcatctcttatctcaaggtacattaggaactgtccaacactatgatccgatgggagatcagtatattcatataaagaagaaaatttgttgttagtgaaagtcaagtcttttaaaaaaataatagttacagcatttgcaatatacaagcataatagatttactcaacgcccaccccccatctttaaaaaatcaatttccgacagttgtctactttaaaattgaacatatttgctacctggagggaacattgtaatgtagcccatatgtggtatgcatcctgaagaaaacctgaaattatagaggaagttatcctgccttctttcttctgttgaatgagttaaaatatattaacaatttgcctttcactttgtatttatcattttgtatctttgcatatttacatatacattcatgtgtacaagggcatatatactcacaggtcagggctatttaaacagctatttatttgaatatgccagggaaaatctccaagatataaagaagcagttattagatactatgtcagtatagaattaacagccatcttttttaagatggaagagaaaattaattaattacatacaatttctaacctcaagacattttctttctggagacaaggaatactgaggtgctcacgatagtgaagactcaacaagaccctaataaaatagatgaggataagtaaaactacaatagccaataaaaaacaaaaaacaataaaccatgtttcgctggcatgttggtgagtatctctgtaatatctgtcaataagggtctctgtagatttggagtaatgttcaggaactacctgtactagagaagacagtggagaggactccagtggctaaattctgctgcctttgcttccagaaatgtaaataataaggaggtattgtggcatttcctggaagcagtagtcttgtttcatggtctgactgtataagaatgcctagagaaacataacctcagctgactaaactcccttgatgattgtcactttgtcactgaactctgaccataccttttgcctccagaggcaaaagacgggtgaggaagtgatctcctcatctggtttttaaacaagtatataactagagaactggattatctcctaaacccactcttgtccctggaaaaaggggagtcatcctatccgtttcttagccaatttatgtatactcttagtttgagagcatgagaaggaaaactattttcttttcttaccttggctgggtttttaagaatttatttttagtttaatcaaaataatattttaaaaggtagtaagcctctcataagcagtttgatctgttctaaaataacttcaatttttctttttttaaactttcttttatcttacacacaaagtataatagtaatatgtactcactagaacaaatgaaacaggatggagtcacatagagaaatatatcatattctccctatcccctcccttaatattaacatttaggtgtcatgtgcttctccattaattttcattgcaaaggcctaaattttcttccaagagtgaggagtagcagcacggtagtttggacctgatatagctctctttccctagccttttgcttaagtgctttcctaggggctgactttacttacctaaagatgtttcaagcaagggctcacatttttggtagcagaagacacttactgattgctctcactaataattttgaaaggaatgtcaaaatctgggaggatcatgaaagaaatatcagaaatttcctttcagctgccattctccttaatactgttatcaataaattcagcatctcatatgtgatagcaaaaaaggtgctgccttttgttcttgcatcctgaggttcttacctaataccatggtagcaataaagatggtgagaaaattgcttcttctatggtgttcaggtcctgaacgagcaccctcacctccacagacggtggcaggtattcaagcattttacagactttggagttaaatatagcagtgttattctaatttaggtatgccaccaccagcggcaccggcaactgcaataggaaaaatgattggcaatgccagctatctgatgttttcatgtgccaggtgctgtcagttcttcacagtattacattccatcctcacaacaagagagtgccagtgagtgttgctgtgtgccagtgcccaggctaagggctttgaacacattaccctgttttatcctcataactttccacgttatttttattcctgaatgaagaaacaagttctctgtagagatgctgtcattgatccactcatatcctttcacatccgtttaacattttccctgctgtgcttttactcccaacaactagctccctaatcgctctgttggagggtggccttgaggctgccagagcctatttggtctgtgtaaagagagagatggatctatcctggaatttatgtccctgtgtgtgggaagcccttaatcaatgactgctggttgcagacacataaatacgtgagctttcttgttcccaactgagaaattcagaagtgtgaatggcactgccaccctgggcttttatgccatatatgtgtttggtctgtttcccttcccaatctcacttcattttcccttaccagtgtttcttgaaaacacatcccattagatcatttttgcatgaagcttcatctcagaacctccatttagggaacccaaactaagatattctctaaaatagaaactttattgataaagtttccaaactgtcttagtagatggccaatataagaccaagccaaatctttctgggtccaaattccctgtctttaattaatagactccattacaacacattcttcaatctttagtcagcaaacacttaccacgtgcctattttatggcatattatatttataccatagttaggatattatggttcatgaatattttatatctgtacacctgaaattctattgacctctctgggccacagttttgcatctgtaaaatcagcacaataatgctacttatctcatagagtagacttaaaaacgaatgaaatgatatatgccaagtgttgagaatcacaattggcaattactcatgctcattaaatattagctgtttttatgagtattgtttcattttcggtgcataatatcctatgcaaagaacaaaaggtattggtataggcattgaaacttgaagcatagaagaaaaagttaattaaccggtgccccactagatgcctctaactgctggctccgtgtatccctttagccttggctcgtcacgagaaaaccttggagacatttctgctggactcagcagatcaatttaagaaagatgaatgacatttttcttgaaatgtattcagtcatagctgcctttttctactttcatattttggagttcttagaaaaaattaaggactcctttttttaaagaaaatggtataaaagaaaatgcatatcactttgtcactttattattgtaacctcatcaaagtattcagtgtaaagacagtagccaagtgaactcttcttgtaatgctcggaaaccattttagcaatggtaaaattgctgcaatttatattcgtcaaattgcatgatttgacttattttagaaaagttattaacttctgaagagaatgcttcagaagcatttaaatgagtacaagttatcaccagtgatatacataaatttcatttcaaaatatacttctagaaactgtacttagttagctatagtatttgtacaaggattaattcctatttcattttgtaggaatttatttatgaatgtctatggcctgccagtgtaaagcagacttagagcatcatcttttacaataatctttttttttttaatcaaaggggagatattctggtaaaacaaaacaaaacaaaaacaatagtttattctgcatttttattaagtccctctgtaagtcatccctgaaatgggatatgtagagtcttatatttatttatttctcagaagcttattggaggtgatatgaaggattttaagaccctactaactaacaaaacaacaatttaaaattaattttcaaaataccttaacaaatcttattctccttattttcaaattctttaacaatgtttttcttattactaacataatatcttctgatgtagtcataataatatctaaaatgacaggtctaagtaacttacatggattaattgagtcttctaaatagtaaggtagatggcactattacttctatatgagaaatgaggaagtagaggtataaataagaaattttttggccgggtgcggtggctcacgcctgtaatcccagcactttgggaggccgaggcgggctgatcacgaggtcaggagatcgagaccatcctggcgaacacggtgaaaccccgtctctactaaaaatataaaaaattagcctggcgtggtagtgggtgcctgtagtcccagctactcgggaggctgaggcaggagaatggcgtgaacccgggaggtggaggttgcagtgagccgagatcgcgccactgcactccagcctgggtgacagagcgagactccatctcaaaaaaaaaaaaaaaaaagaagaaatttttttgagtgtatacagttagaaaatggcaaaatgggaattcagacccaaacagtaagactcaaggatacctttcttatcagtatgctaatatgaaaacctaagcatactagaaaatctaagtgccagttggaaaccagaattaacattttggtgtgtaactttctggctgctttttctatgctaacaaacatatatgacatacaaaaatacacacatacacaaattcctgttcactacttcttttatgttaacatcacaatgtaccgtacacagctgtattattttatatttgatttcatattttttctaaagtcagtgtatttgtcaaatatcaacttatctatttaataggaatatgggatgatctttgcttatacatacatacatatgtatataaaaacaaaatcaagtattttaagcgttcaccagaagtcatatgtcaatcagtaaagtatataattttttgctgccaatgacatatatcataaaaacgctacctatcatagaatgaaaatgaaacacagcaatattgggacacctattctcaagcaacagctttgtgatttattagctatctcacatgaaataactcattaacttggtattccaagcagcaaaagaaggatcacttaggtcacttgcaaaataatacaaagctaggtttaggggtgggttgcgcttggtgggatgtagatgaaaccatatgggcccttgagtttataattgctgggatctgcatggtgggtatatggatgtttattacagtatgctagtgagttaagaaagaagaggaattattattgacttacatcatagagtttatgcaaaaattaaacgataatttatttttaaactctagaggtataggtaccatcatgaagggacccacagaactgatgtagccagtaattattggagctggaacagatactctgctgtcagttgttctggttttgtggtcattgttcttgcctttgcaagttaccaactctaagaccttgggcaatactttaagtcttggttgtctcatctgtaaaatggggagagcagtaagtgtcttaaaggtttattctcatgttatatgacttacggtatgtaaaacatctgcgtttagacacatagagggtgcttaatggatgattgctctcattattaggctacatctaatctatgaatttaaaaactgtatagaaatatgtgacagattctttaagagccaaataccaactacagtgaaaaatacttaacacttgctgagctcttagtatgtgtcaggcttaactaccttaatgctcatagcaatcctataagataggtactcttgttatcctattttatatcttctaaaattgaagcaagggaagttaaataataggacaaagatcatacgctatctatccatatatacccatctggctgtctacctgtctccttccatccatccatccacttattcatctacccatccatccactcagttacttctctctctcccaccatccctttccctttccctctccctctccctgtctctgtcactctcctttacttatctatctatcgatggatcggtttatctatcatctatctatctctatcatctatgtatagttgttaataacactaacattttataaattacaagactgaaaaatgttttcattaacttatggtaacaaaagaccacattgtgaataaaaaaagcagtaaacacaggtctctgcacatatgaaagagatgtcctaaacaggaagagatgtcctaaacagtagggatacatagtatcatacaatcaaaacatggcagccctataaaacttacaaagcaatttcatgtaagttatttcatttgactcttaccacaatctatgaggttactatttttatttttctcattttacaggttaaatttaatatggcttccaataaaaaattagtatggttaataaatatcttgacgtcttgctcctataatcctaccgatagtttacagtaattagtaaaataaaataataggaaaaatacctttgatactagtattaaattataatcatatcattaggtaatttcaatttgtgattttcaagaatctgtaatatggtagcttcttcctactgacatgtttgaattcattttaaggcttataattcacaagtaatctatatattatctaaaatgtaaatgcacattcacatggagataataaattagcgtgaaatggctgtattttgctctctataatttttaacatacaggaaatcactgttgtctcaaaaatcaaggaaatatagtatttgaggtgaacttattctttctactattaacacattttaatatagttctctcacagtgcaacagagcaagaagctttcagacacatttgctgctgcaaggagcatgctgtgctgaacttaaaacaccttccctttcaaactccttgggactgtttttttccaagagacttcaaatgcactaaatttagcatccgttggaggcacacccaggcatattatagtgaaagccccaataactgaatgtgttaccactattcacaatgtttatgtgtgtatatgccttatctatgatgtattgcaaattacaaaaattgtgttattattcacagtaacaaaaacacttccagcaaatttctaacagtgatctcttttgaaataacttacatacatgtgtcatgggtcttaaactttgtcacttttatgtttccatcatgttgttttagccagtgagggttttgtttggttttcatttatgattatatactttcaaaaaatagatttcaaagtgtgaatttgattgattgattgactgattcattgagacggtgtttcactcttgttgcccaggctggggtgcaatggtgcgatctcggctcaccacaacctctaccacccaggttcaagcgattctcctgcctcagcctccctagtagctgggattacagatgtgcaccaccacgcctggctaattttttgtatttttagtagagacaggggttcaccatgttggccaggctggtctcgaactcctgacctcaggtgatccaccctcctcagcttcccaaagcactggaattccagacgtgagccaccgcgcccagcccgtgaattttatttttgaaagacaagaatgtccttgcctaattgcataatagtttaacatcatgaagactaaatatgctttttagccatgacaattttatttattattgttttcatttttaattttctcaaagatcctcatcagtgtactctttttggtcttccttataagcgtattttaacaggacataataataagataaatcccaactttttaaagttgtatccgtatgtattactttaaagtgctattaatataaacgaattagaggcaacttttattcaatcagattttaagtaattttaccaaaaatatggccttgataatgtctctgtaacaggttctctgtaatatacatgctgaggattggtttgtctttgcttttgatactattttaattagaaaagtaatggggaatccagacccttctcatttaataatccagagaaaaatcagtccatgttctaatagtttaaatttttctactaaaacccatgtgagaatccatatgagtggaatggagaggagttcagcttcaaagttggcagatttgagatgattctatggcaacagaaatgtgcttgagggaaatcagttgcggcatcttctataattgtgtcacctagattttgccttaggaatttctagatttccatagaacattgtgacctcaaatgctttatcttaataaagaaataaaagcagattagaagaattatttgcctacagtttgtgggagatgggcaagtcttaagagtttattaggtacccagaacgaaacatattttcttgggcctcataatcacattgaaatacaaggatttagttatacacagtgaccagttagtgaatgacagtcttcagtatctagtagacagtaaacatataaagatgtatttgtggccgggcacggtggctcacgcctgtaatcccagcactttgggaggccgaggcgggcggatcacgaggtcaggagaccgagaccatcctggctaacacggtgaaacctcgtctctactaaaaaatacaaaaaaaaaaaaattagccatgcgtggtggcgggcgcctgtggtcccagctactcgggaggttaaggcaggagaatggcgtgaacccgggaggcggagcttgcagtgagcagaggtcaggccactgcactccagcctgggcgacagagggagactccatctcaaaaagaaaaaaaaaaaaaatgtatttttacttttaactacagcgagagaccctggcagcctacagcatacaattagtgttcattatttagattgcatggatttaatgtgaggggtcaattacttgtctaaccagtgagcctagcctcttgctcaatactgcctgcttcatgagggtgaactgtgctggagaaatatattacaggattatctgcagattttttttaaatgagtggttaagtcaaaagttcttgtgaaaattcagagtaataaattattatgaagttgtgtaactaggtaaaggatagtttcttttacacgggtaaagattaacatgaggaggaaaactttagcaatggcatttaattccattcaatatatttatattgagctcctttaaaaatacagggccttgtggtgggtgctgaggacagaacaaaaaccaagtaatacatgaacataacccttgatttcatgatctagtagacctataaaagttgtcgatatctgatgaaaagaaaatggtaaagatattccaaacagtgtatgcaaatccagagataggatggaggggctctacctgaaggatgatgataagaaaaccgtgttgagtgaagggtgatttgtggaattcagataaaatatcagtcttgaatgctgagtgaatactcaatgattgactagatcccatggacagtaatttcttcaattatgacgatgctagtgtttatgactataactatcattctccatgccaggcactttgccatttggtaaatgtatagtgtgctattctaacaagcatgcacagagcttttactttaatgtatccatgagtttattggggttcagaatttaggtaagctttgcaaggtcgtagcatggagtaaaatatctgaaattcagacccatatctaactaagttcaaagactgtacagatatttctcctcctttgtgcagagaaggataggaatggttccatattatcatggacttagtcagatgttttaaaattataatgtcctgtgttaatgaagaagggatgatattcagtgcatattcttaaccgttactttgcttaatgctctcgacttttctgtgagatggatagtgtagataaaatccccaaggggactcagcaagtgcaagtaaaacaatgaaactttaaagccctttgtcaaaacctctctttttctcagaggatggaagggccgtaaaggttggtgaggaaggatggaccatttcctatgtagtcttctgacaatattcaaacaaaaggagagtcagcaaatcccccttgatgtgggaagttttaatacaatttgcagagtgtctctctggagtagacatcctcctctgcaatcgtgtcttctatatagcctcagggctttgggtaggtaatcctctccaaggagagtcctggagagggctgtctaccccccttgcaccatcctctaacattattctatagctcagctccttgtttctgtttcctgccttgtttttgtctgagtctgcaattatgatgtaagcaccatgaaggaaggtatgttgccagtgtttgcatcagcatatcccccgtgtgtagcagcgcaagggatatagtgagccctcaatgtctatttgtagaaaaaagaatgaacgtatcaacgaaatctgatacatattcattgtgtctgttatctccatctctcttgtcctgccttgttatcttgccattttcacaaaaggccccaaggcccatcatttcttgtgtaacttccagagtgttaatttttaaattaaaattaaggctttctacatgagtgtctattatttgagaaaccatgcaagatcgtgtgtgtgtgtgtgtgtgtgtgtgtgtgtgtgtgtgtgtgtgtgttgcactctatattatattgaattctggattttttcttataaataaaattttaaaaatagttctttaaaaataggaataagatgttttaggaggcacagagagcaaaggagaataaaaattgcaggtttggggttgtgcatactaattgccattgagtaaagagagcacactgaggccatttagaagagaattaacgtgttttgtttttgtttttgtttttgtttttgtttttgtttttgttttgagacggagtctcgctctgtcacccaggctgaagtgcagtggtatgatctcggctcactgcaacctccacctcccgggttcaagtgattcttgtgcctcggcctcccaagcagctgggattagaggcgcccacaaccacgccaggctatttgttttttttttttgtatttttagtagagacggggtttcaccatgttggccaggctggtctcgaactcctagcctcaagtcatccacccgactcagcctcccaaagtgttgggattataggtgtgatccactgcacctgaccttatttttattcatttaaaaatattaaatgttactgcatagggagtaatgggcttaacaatgaggtgaccaaaactcctatgtaccatgcagagcaatgtatcaaatgtttttaactataaacttctcaaaaacataaacctaattgttctgcagctgcaggttatatctgccttgtttgagcaaaatttggtggtgaaaatgccttgcttccatttttccttcaataactgatatggtttggctgtgtccccacccaaatctcatcttgaattctactcccataattcctacttgttgtgggagggatccagtgggaggtcatttgaatcatgggggcggtttcccccatactgttctcatggtactgaataagtctcacgagatctgttggttttatcaggggtttctgctcttgcgtctccacattttctcttctgcttccatgtaagaagtgcctttcacctcccaccatgattctgaggcctccccagtcatgtggaactataagttcaattaaactactttttcttcccagtctcaagtatgtctttatcacagcatgaaaacggactaatacaataacctatataattttgaaaagtacttgtctaatagactttcacaatagaaactatatccttatcaactttgaaaagtcattgcttaatgcctttggataactgaattttctaagattattttaattttgaaagttaaattttatcccagtgttgacgatttttgtatgctacttttaaaatattttgtcagtgatttatatctatggtgcaatcttgtaaaaaattaacaatgcaaatgtggctagaccatttaaaaatcaatatgttataattcagcccatttaatcactttagttaaacatcttaggaacaactcagttccatttgagagaagacacagttttctagatgtgtgttgtggcatcatattgctttacaatatcttacataaggtgaattcaaatcatatcattgaatctgttttaaattctgtcatagcttaagattagtgactaaatattggcaggtttatggaagtaggatgtaaacaagacaaaaacaagggtggaacaagtaattttagtatattattcacttgcacagagaaaagtcattcacaccttcttcagctttgtgaagaaaatagactaaaatcctgttgatatagcaactatgttttccgtttcttgtataaaaataaagaaaacttcctattaggaattagccagacattttaattttctctcttctttctctattttcccttacagtctctttgaaggcaggcaaaatttctataaagttttaagaatgttttaagatttttttattgtgaaatattcatagactcacaaggagttgcaaaaacagtacagagatttcctgtgtatacataacccaactttccccagttacatattaaccaaatacagtatattaccaaacccaataaactgacattggcacagtgcaatcaactagactgtagaccttacttggatttcacctgtttttgcacatgctcttttactgtgagtcattatctgttattctatgacattaaccatgtctatagatttatatagttactaccactatcaagataaagaagtgtttcatcaccacaaagtaacttaaaggattatttttataaagtaatgacaaatgtgtcaaaagccattcctgtgttatatagcaagtatgttttgagttattaaaactcactgatcatgtctttcagtgtcataactttgggtttccctccctaactataataatcctgatgaattacagttgatgaatatgagaatatccaactcttcctgactctataaatatattgactgagattgtaatatttatggtgtcttaaggggcgcttgttttattatgatgatgtgaacatgttgagaatagtaagaacagcccagtttagcaaacaggatatgagtcttctatatccagctcaatcgttgccccaacaggggacatctgcctttgctacttaattttccattctggaaaatgtgaagtgtatgagaatgaataatcgtctccgattttccagcacataataatctgaggagagcaggtacagcaatttaggagctgttttcttttggtttccaaaaaaagttccgtccagtggtctaagttagtcgtttactaagtgatagagcaattggctatgctttttgaacggactgataattatgtggatgcagcaaataggatatagacaatgcatctactccattacagtaaaaaagactctgatagcagttaatccacataccaggcacttagcttaggcacagttggaggaaatggaatggtaatagactgtagtatggcatgacaggagctgtagcttgagattcagaattccaactctgcctctcaatatttgagtcctcatggccaagatatgtaaagtgctctgtgcaggtcttggcaaccatccaccacacacttagtatgcaatatctatctttattagtcaaggatctggaaagctagttgatgagacaaatgatagaaacaagagttcattagatgaaataaagtaataaatgatgcaagaatttaaaaaagatttagagaaggaaagggaacagaactcacatgcaagtagagcaactgtgtatcagataatgtgctagctgagttagaaaccatgtctcatattaccctgaaaataattctgcaaagctgtaggtgttatttttttcatttgacaggtgaattcatgaaggcttgaatatagggttaagtgagttgtttcaatgtagttattgattcaaatcaagatctgaatgactctaaatatggtgctatagagatttgaagtaggataaataggatttgaaaaaaagaaaaaatatatagggaaaggaattggtacactgtagcagtgtcataaatgaagcttcagttgtgtgattccagatgatgtatgtgaggcctaatcaaacagctttgtggaatcaaaatttctgctcttgtctccaactggggacgagttggctcgggattaaggtgggcgaccttgggaagactagagtctaagcaggactttagtccctcataagaattatatgaggatgtatatttgcatacaaattcctgggcccaccgagatctgccaaattggaatgtgtggtgatatcacccagggaaacatagagagctgttataattagtcatgaaatatttagtactgaaattatagattatgttaaataatcacttataggggacatagcagggttggcaggttaaccatacagcaaacagggttgtaagtcagggcctagagaattttcaagaggcaggaattctgcagaatgaaggcctggtctcatgcagcaccatggacagctccgaggcactcttgtttctccaaaaacctgaaatcaaaaactttgcttttcatcatgcaacatacccatgtaacaatcctgcataggtactccctagtccaaaattaaagttgaaaaaaaaaactatactttcatttgaatacagttctcttcggctttaccagctctactctggaaggaatatcttttactcaatgaaaggccatcccctgttaatgcctggccaggttctccttatcagtcattcactatctttgtgtgtgagtgactaaacatataatgctatgtttagtggatggagtaagattacctttgcagaggttgtactggcttacccctttggttcttgtagttttcttctattagagttttttccatccctaggtttctatactgttcaaatgggtttaagattcttgaaggtattcctctgaccttgtaatttatgcttgtctcctagcacaacttttttttgtaaaggaggcaccaactatgtggtttgctggcgatggcatacacaaatcaggtgggaggaattaatgagagcagcaattccaatatctggttcttcaagattaacttgtatagtttaattcagcattctaaataagcctcatagatttaaaaatctagaataaacccacatttttaaaaaaagttttatgttatctgtgctgataatgcacgctgtacataataaaatattattttcttttttttaaatttattattatactttaagttttagggcacatgtgcacaatgtgcaggttagttacatatgtatacatgtgccatgctggtgcgctgcacccactaactcgtcatctagcttaaggtaaatctcccaatgctatccctcccccttccccccaccccacagcagtccccagagtgtgatattccccttcctgtgtccatgtgttctcattgttcaattcccaatattattttctaagtggcagtggaagaaacatggaaagttctacttcatccatcggtggattagaatttgtataccatgagatgattaattttcaaaaccagtttgaatctcacaaaataatgaccctgttttttgaaggacaaggcagaacaaggaactaggctgtgccacgttcaagtcacaatctctaacatttgttttgttttgttttgttttgttttgttttgttttgttttgtttaatctctgttgcttgttcactttctcttgtaatctgcattgatttgctacctggctatttgtagattgacttcggctgccaggaatggaatgtttttcataaaggaacatatgccttaatgaaagtaccataagaagggagtagagtgtgaccaattgcctaggtaataagtagtgacaacaatgatattattctagtataaatggaatcagtttttctttgcccagggggcatgataaagaaggcctggctggtatatactaggtgggacacaccaacagtgcctagaatgtcaatggatcaaacctgagggaaccagaagttgaaaagacatatcccaaaagaaagcatttgatgtttaagggttggcttacttagaacacaatgaaaaatattactaaaattaaaactatgattttagctatttttaaatatgacaaattaaatagcagaacattttaataaaacattacttaaggtccacaattttctgtaagtctaatacatgggtcattaaaataaaaaattccccatgatttatggaatcagatttttttaatacaacgaattctaaatggttttataatgccaattccaattaatatcctaattataacatgtcatccagaagggttaatgactaaattttattaatatttgttttctatttattttgatttgtgcagtttatgtgtatagtaacgatagctgcaaattagataccattagcattaaataaggtatatattttaatagaaaattaaagttaagtatttgagctagcctaaaatattcaacaacttaaatttgttttttgtggatcacatttttttgagacaaagtcttgctctgctgcccaggcttgagtgcagtggtgcattcatggctcactgcctcaaccatccaggctcaggtgatcctcccacctcagcctcccgggtagctgaggctactggcgcacgccaccatgcccagctaattttttgtatttttttttagagatggtgtttcaccatctggtctcaaactcctgagctcaagcaatctgcccaccttggcctcccaaaatgccgagattacaggcgtgatccagtgcactcacccctgtgaaccaccattaaatagctaataaaagatgcatgtcaataaaaataaacaacttactagaatgattatgtgaaaatcatttattcttccaaagcatgaattttcaaacacaccttttgttactgttttaagaagggaatcatttccatatatttgcatgtaaatcacttttagtctcagagaactttccataaaagtttttttattactgctgtaaccgatagagctagtggactattaatttaaaaagctgtacataaaaacacatctatagctcaaataatctaggataccttttagtttggggaaatgtagatgaaaatgaagtaattacagaatccttgttaattttcagatttagacagtctaggcaatatctttcaggaatgaagagatatgtgttttttggcatcttggtagagtatattcccattgtaattcttttgtgaagtctagaccagatgtggccataaaaatagacccctactacaataatatatttcatagataatccaataaagtcaaatcttattgcagtaggcttagaactctgtttgcacccatggaatttatatcagtttttggcaaatcctttcatctctgaggatactttttcatctcacatataccctattttctgaacattttgccttcaaagtatacctcatttatcaagaatttctctttattcatctgacttatacaagtggcaataacaacgtctggttcccatgaagtaaccagtgaccctttgaaataatatagcgctggaagaaagaaaaggaaagggagactgatcattcagcaactctttaaaaccatgtcaccgttaaacacatagtttattttatcttttttttagaattgtgaaaacctatattagcatcttcacggatgtctcctttgtttacatccccgcttctgtgccttgcctgcagtagaaaaaaaaaggacatgtgtatccctattccccattgtcttctcattctacatgagaatgagaattcttttaatttcttctctatctacatgaacccacttccattatctgtttgttcagttctttaaatgccctgaagctagctctgtgactgggcagttgaaagttctggacttagcatcaggttaatttgaaaaatacttattgagccaccaccatatgtcagccactactgtagatgttttgaatgtgtcagtgaacaaagcagaaaagatgtatgccctctggattcttgggggtctcaaatagtgaaagacagatacgataagtatattgtatagtatgttcaaaagtgataagtgctgtgaaaaaaaagaagaagggtaaaataagagatggctcatgctggagtacattccaattttaaatagggtatcatggtattcttcattgagaaggtgacatttgagcaaagatctcaaagaatgaggcatggggttgaatcatgtagatatcagcagtaaactcattttgggttcagtaaacagtcaatgcagaattcctaagccatcggtttatctgctgtttggggctggttatctgcagtgtggctagagtgaagtaagtgagagaggtttaggagagaatgttagtgaggtgagggtggacctttgaagccattgtaaggacgtttttctctttctaagtgtgagaagatgatgctgactgagaccagggtgataagaaatagtcatattctgaacgtgtttggaagtggggccaacaaggatttctggatgaattggataaggggcatgggagaaaaatggagtcatgaatggctccaacgtttttgctctgattaactggaagggataaagttgccctaaactgaaataataaagactatagatagaatggggcgattagggaggcattaaatttggatatctgttagacatatcaccagatatattgaataggcaattgaataaatacctttagagttcagcaaaaaaggtccaggttggacgtttaaatttcggaggtgtttgtataagataacatttaaagctgtgatatcagattgtatcactaaggaagaatatagatagaaatgacaacgtgactaaggactctaacattaagaggtggattgacaaaggagaaaacagcacaggataatgaaaaggaatgatcagccaggcatggtggctcacacctgtaatcctagtactttgggaggccgaggcgggcagatcacgaggtcaggagttggagaccagcctggccaacatggtgaaaccccatctctactaaaaatacaaaattagctgggtgtggtggcacacacctgtagtcccagctgctctggaggctgaggcagaagaattgcttgtacctaggagacagaggttgcagtgagccaaaagattgtgccactgcgctccaacctgggcgatggagcgagacttcatctaaaaaaaaaaaaaaaaaaaaaaaaaaaaaaaagaaaagaaaaggagtgatcaatgagatgggaagaaaaacaaaagtgtgtggtgtcctcaaaaactgacgttctattttcaaaacctacattttgggtctccttttactatatcctgactttctagctatataaccaaaaggagaaagcagtaatttttttagatataacatgttaataactctaagggtattcaatgaatctgaataattcagtggtataatgtgaaaaaatatagtattcataggaaaaggaacagaagttagctcaggaaatgacttgaatgaacaccgaagccaaatctccagcgcaggtccacgtattatttgtctcagtggttgaattagcagcaagattccttagtaggatgaaaaaagatgttgtgagcatctgtatctacatgactgaattaaattcctccaacaatgaaatgtagttaacgtagtatctcgaaaagaaccctaagtggaattcagggaacctaaattccaaccatggttttgctgctgactgattgcattcacttcaaatctatcattaacctccttgtgcctcattatcctcatttcaccaaataagaaaaatgaaatattcctccttccctacctcactaggatgttgtggatttaaatgtgtgagaagtgcttgagatgcataaaatttgatggagtgttttattcatgaattcaaggcatctgaagtaatttgaccatgatggacagttgcttccttgcacattttttagagtgacatttccgttactgacccacccatttatgcaacatgttgcctaatctaaatttaggtcaaaacaaattgaccttataggtaagcattatatctattaatattgtatttttgtattattttataatattcatcattcacctattttctcatgcaatatatgttactgaacacatatagattaaaaagccttcatccctaaataacaatgatgggaccttccatttttatatccctctggcatttaaaatgtgcttttatagccatcatctccattgatctctcagtcccttgaggttgatatgacagatatgctttttccattttaaaattacggaactgacagtctcagatgactttaccctccaactactgtgtgaagaagcagggtctggcactgaggtcttctgacatccagtgtagagcactatacttcacaatatggccattggcttactttattacaagcactaaatattttccactgaatacgtaatacctagaggagaatgtcgtgtaaaacagcagcagtagaacagaggattaaatgacccattttcttgaagttatcttagttttaaagggttttttcttcatcactaatgaccatccctgactaagaaattattctcataatacatgataatatctgcgttttccaatgcgacaagaatgttaggatgtctatacatgatcttgacaatccctagctccatcacaatgtgtccaaattcattttatttggctagacaggcatgtagtcttactttcaatggttggctctgctggatgctatgtgatctagaacctgtcacttaccccttctaaacttcaggaattttttatccttaagataacaagaaaactcgtacctgtttcaaagagctgtttgttcaatcacctatccattgattatcttctatatgccaaatgtttttctaggtgctgaattacaggaatgaatcagaagcaaaaagttcttactctcaaggatcttatatgctaatgaaatagatgttaaaaaataacaatttttgtttcattttattttattttattttgttgagacagagtctcactctgtcacccaggctggagtgcagtggcacagtctctgctcactgcaacctctgcctcccgggttcaaatgattctcctgcctcagcctaccgagtagctgggattacaggcatgcgccaccatgcctggctaatttttgtatttttagtagagatggggtttcaccatattggccaggctgttctcgagctcctgacctcaggtgatctgccctccacggcctcccaaagtgctgggattacgggcatgagccagcgcacctggcattaaaaagtaataacaatttttaaatatcaatatgtcttatacagaaaagtgagcagtgtggtagagtgtaactggaatgtgagttgagacataacaccagacagagaagccagagaaggacttttgtttgaggaaatgacatttgaaaaggaacctgaatagtgacagaggcagatacctaaagaatatgttccagacaaaggaaacaaaaagcgtgcaattgcatagtcaacttagcctacttgaggaaaagtgtgagtggattttggtgatggagaggtaagtgccaggagatgaagggagagatctggcatgcatcagatgatgtgcagtcttccgggacgttgtaaagagttgggctttttttgtttataaattaaatgttaagccattggggtttttaaccagaggagttatgtgatatgatctatagttaaattatgtttgttcttggatggagtgtgcattatgggaatttatacagaaacaagatttcacatatatatatatataaaactcagtgtcaatagaaaataataaaaacaaattttatccattgataattctggcattgatagtagtgggtatggtggtaataattgtgtgtaacactcaaactttctgaaaacctacacttgatctgtaaatccaaaagtatatgtagcaaaagccataatctgctcttatttctgcaccacttgcaccagtgtggagtgataaggcaaattattcaggcacctgtgtaagccttcagtgtcctcacccccttgttataactctccactaatattacattggtaaagacgtccctgacctatatgtcactgagacctcaaagaaaagagcaaagctaaagcgtaagggggaaaaaagccagcttaaaaagacttaaaggtttctgggaccaaaaaaaaaaaaaaaaagtctttgaaaaatgagaaaggaaggatagaagaaaagattctcctttggtcaatctggccaacctttggaaataaaaagtattgtgttgcagctaataactatttgtcactgcaggcacttgctgatgtctgccctttaaaatgacccaaactcgttggcctcgaaatcagaagccaaggaaaaaatcttggacataatgttttctgtagaattaccaattttctctctctctctctctctctctctctccctccctctctctctctctctccatatctatatatatatagatgtatatatattttttctgtaggaactaccaattcctatctatagggactgattgagaagtcccttatagcagtttttctttggcttttaggatgcaatgattattggtgagaataactctttcatttcacatttgtcattggcttatttgaatgtaatcctgattcaatcgttatgatctcctttaagtaggaagagaagctggtattacattgtaggattttaattttgtactcatgaaacttttgaaaaacattactcatactcttctgactgtcaaattggcctctaagaggtccacatctcaagaggtatcaagcattggtaactattttttggtgttgttttctcatcataaaatgtacttttattaggtgactttggaaattttattgaatcaatgcatgacactgcctcattctagtaatctgatgaagcaaagctgaaaaacaaaatttgaggattgtcagtatatatacttttatttgcagtcaagagttatgctgcaaaaatggtttattgaagtaacaaaattttagctgatatattaatctgaaagatacagtatacatttttagtatggaaaagatgaggaaaaggaggttctctttcctctaggtatctagagcaaactgtaactgtccttggtatttaatttttggctaaggtactgagattagaggtggggccttagatatgattaattgtcagactgataagctagatatttcattgagtttctgttgtgctctttctttcagatcctctgttcgatgctttgttataaagatttgggcatttcaaaatcttctccatatctggtgtctttccaaacagcaggtcatagactttacacaaagaggaacgacacaggttataagtagaagtgttttaaaccctgagttcctatttcagttttgctttcttaaacatattttccttatgtgataaatgcgagtgttgaatggtgataaataccacccataggctttaaagcctaaatgttgaatttgacactgagagtttaaaggcatcatgaaaatttctccagaactaatgttcaagcaatttaggttttacaggcaactcaatagttttgaatgatgtagttattttgaaaaagtcaccataaaacgctatgtttagggaattggtactttgcatttatcagaagattgtaaatgtcaatcgattggcttgctatttggaatataattttttaaattatagttcaaatcattaggatttaattcatgattttgtactacaaactaaatctatgaaaaatatcagatatttattttaaattagaggcatgtaaaggaaaatataaattttgaaatgccattttactggatttttctcttcagcccaccctaggcatttgttacataaaatatttctgaggaagtcttccactgattttgtaaacaaacatgttttattgaacagttctttgttgactagattaacattgaccattgtatgcaatgcattctcaaaatcttagaagctggttttctttttaatcatataattttacttgttttacagtgaaattaatgcatgtaaaaagtatacctatatagaaagttaaaagaatattgctaactagttactatacttccaaattgcctattttctgtgtcttgcattggacagtagtgattacctctaaaagaaaatggatggtctttgtttcattgaagggatggataatggacataactggcattcttgagcaatgcaattgcaaatacatgtctttgcatttatggtccaatcatcttcttactatgatagcatataattgaaggttcaaataaatgcctcgtcccttcctgtggcatattaaagagaaagaaaaattagaaatactttcaaagctacctcacatactaatggtagagttgtttgagtatttaggtgatttaacaaagctgatgtattttattatgcttgatcattgaggaaaatttatttatcggaatgcttttgagagcatatatattgtcagagataaacacagctggatattaaagaggtaaaaacagattttattcaatacctcgtgaaattaggggagagctgagatccattctaatttgtgcagaggcgacttggttgttttaaggcaagaaggagggagaaggagtgggggttcattcgagttagagaagtaaaaaagtacaaagggctggacagtgtaaatgtgattaggccagctgtgttagctggaagttattgaagttaggattctatcttcccacagagaacaggagacagaggacttatccttcttgatgatgtcatttgaaaagaatggctttcaggtccttgagtgagagacacttctgatttccaagagctacatgttcacaattgtaagcccttttgagtaaatgttctaagaaacggaggtaagagtcctatcaacagatgtgtgttggctagaacaaacattaaattttcctggcagcactgagctttctcaagcaggcacttaagggaaggctagggtcatcctagggacatggccttctggggctagaaaccatactagagtttagtcaagtcttagtgcaagggtttggacagagttgttaagtgctgagagttctgtatttctcactgtcacaaaggaagatcagaagctcctgatacttttttcatcagtacaattgaatatataaatcctatacacaaaaataaactaagcttatacaagcatattggtcaaggaatgttgctggccttattaattagatagcccagttaaaagaagaattttttaatataattaatgttaaagtaggatgatagtatataaaacgtgtctactgtcctgaatacaaactaaactgtttggtttagcatttacctcaagatctcttaatatcccccaaagggtccctaaaaccacaacttatctttgtgctcatgaagtagagaagagacagttaatagacatttctagctgatagactgttgtagagcagagaacgctctgtgtttttgaaaattaaacatatgaatttgcccctcttcccctattaaggaagaagagtttcttaattgtgcgaacacatcaagtgaactattcaattagatttttgtgacccagggtataaacatctggttaaggttacatatttcaaaggaacaaaacactagaaactcttggttttaaatctcatggctggaggataatttgcagcagagatttatctggcaagcatacagaattgctgagactgttctaaagatgtaagtgtgggtgtttgtgtcgtgaaaatagctgtttacatctattaagtggataccgatggttgaaagtgccgtctatgtcaagtttttaccaaatcaacttttgcctcactgtgtcagaccattttacctaatcaacttggactgctaatgtcctttcccctggcaccactatctgtctcttttgcaaagcacagaaacggcatgcatgattgtagtttataaaacacatgtaccaatgtggtctacagcttctgttgagttcgagagggtcagtttctgtaatctcttctggcacagagtcaagaacagcttcactttcctcctgctacctctctacccgtaagtgtgaacccatcactttgctaacactcaggaaggggattacacaaaatagagcaggagccctctgacctgaatatgcatctgagccctagccatagagcttctgattcagtagatctgggatggggcctaaatatttgcatttttaagtgtataagtgatgctgatgctgctggttccaggaccacattttaagaaatatcgataaaggtggagaattaaactgcagctcagaagacctgagttcttgccccagcttgacttttacaatctagcaaatggataaaactcgcaggacttcagttctcttcatctacacagtgagtggttagattggctttgtaatttaaaattaaacagggtttgattctgattcactacacaaggttccaaagaaggaatgatatctcctttcatttcttcactttgtcttctgtccctaggtaatcttatctatgttcctgatttaacctaactaatgtttctgcaaagcttctaatatttacatctccagccctgaaactctcatttgaatgctagtcttatatacatacccccctgcctaattgacatctccacttaaatgtatcagaggcaactcagactcaacaaggaccaaactgaatgttcgaccttgtccttcaaacccgatacacatccaggttcctccatcccagtgaatgacactatccagttaagcaagccaaaagtctggattttttttcctcactcttcctcactgtccgtcaactaccattattaaatctgtcacctggtcctactgatttaaccttctcaatatctctacagtttttctttatgcccattagtatcctagtgcaagctaccatcgtctctcattggaattaacacagtaacccccctacccaccagactgttctgcctacagatagtgtgatatttaataaatataaatctagccttggctagatttctccttcaaaaggttcacattaattttagccttaaaatggtgtgcaaagctttgcatagtctgtcctttgctatgttggcagtattttttactatccctctcatctgctcattctctgtactccaactacactaactttgtttttttttttttttagatttctctaactacagtgctgtaatctctttttcctttgcacgtactattccgtttgtcagggaatctgctcactgtctccacccactccacacactcacgttttcctgcccgtcttaccggtcttgatcggttgtcacttgctcaggaaggtttccctggtcaccccctccacaaattgaattaagtcctcttgctgcatgctgtcctagtgctctttattttcctctcctcatccttaattcagtttgtaattacatgttatttgtgtgaggatttgattattatctgtgtcacccactagatattgggcattctttacttactcaccactgaattcatagaaccacagtaattgtacacaacaaatattcaagagaaatttattgaattgatgaatgaaaagttgtaccttaacatgttcctgacatgtatccaaaaaagagctcccctttggggtctattaggactttggacctaggtaaacgtaaccctagtttcgctcaggtttaaacagtagaaagtaattgggtctcttttgcatgtggctttcctaagggctaaccctgtcttcggaatgagtcaatacagcagagctgttgaaagcagactctagcttcggacaacgttggtccgaatcatggttccgtcatttcttagctgtgtgatttagaataaattaatgttttaaagctttgatttcctcttccttaatctggagatgctaataaagccaacttcgtagaggtattgcgatgagtaaataagcataatttgctgtaaacaccttgcagattgcctgttgtatgctaactaatcaataaattgaagctcttaacatcattatattagatatttccagcattgagtatactatcaggcatgtggtagaagctcaatataaagttttgttaaattgaatagattccatatatggtatttctacagcattatgctccttatttaagtgtctctaagtattttttaagtatcacctcacaaaagacagatgtttaattcattacacatgtgaattgttttagatagaaaataaaataaaaaattcaaacattgaaatcaatagtgtaccttaccttaggattacaccataaaatttctaccaatcgagaataaagtgtacagtctatttcctttctaatacttttaacgcaacaaatgtttattgaacacttactacttctaatctatgacagacataaagatgaataaagcatgccacaatgtttaaaggagctcactatatcataagaaagcggattcacacagacaactctataagataaagtggtaaatttaggctggcctgtgaaacaaaggattataggtatagttaagaggtggaatttattttacttcgaggatttcagttacctttatattctttgtctaacctttcatgtttctctttcttcagaaacagagcacctttttcctgacacattcatttccccctatggagtagagcagttgttttcaaagtgtgggtcccagatcagcatcacggggatggttagaaatgcccattcttgagcctcacaacagacctactgaaacagaaattcttggagagtggagcccgcagatctgtgatcaagccctgtaggcaattctaacgcacactcaagttaaagaaccacgggaagaaaggtccatcctgtaacaagacagatttttttcattagcatcaattttgatcatttatatatatatatatatatatatatatatatatatatatatgcatgctcacaaaaccattcaccttactaggttttagtattccccttcctgtattcatgtggtatgtatgtatacaagatgaacacacatttacctgagacaaggtaagactacacatgtctcatttggggaccagaggctgtaatcttactcaaggtcaaagcgtcttcactgctttctttcactgcttttcaaaagtaaaatttccatgtaggtgtcatttgttttctttttgtgttttagaaaaccgattaaggggtgaagtctggctaaacttagtgtcaggacatttacttagataaaattattttaatttatcttgtaatgttcaatgtgagaagaaaagtccttatgagtagtgtattccttaaataacaacaatttaaaaactaccactgaagtctgtcagagtagttttgcctcatttgtctagataagagaaaaaaggttcacattagggattgcaatttgtctgccaaagtgcagtttatttattcagaaacatttagagaggaatgtgtcagttctgttgcaggcactgtgctgtgacggggagctcaagatgatctcaaaaaatttcacagatggggtgggcagggggcacagagagatgtatttagtggttcagatactatttagactgtggccagcatttctctaaatgcaatccagataacaccttacagaatcatctgggcagcttgataaaagctgtagactcctacccttcatcccaaacctattgaatcagtgtctgtgtgtgaagacctagattgtgactggtaattataccaaagtcttagaagcaactctaggccagtaatactcacatcagaatcagctggagggtttgctataccacagattgctaggttagccttcagagttgctggtccagtaactttggtgcaggtccagattttgcatttccagcaagttaccaggtgatactgatgctgctggccttgatcgtgctttgaaaaccactgctttagctacgctataggaaaaaccatataaggcttttatactggccaatgacttcacaggcctgaattttagaaagcccccttctgcagcttggcctatagattcgaaggaaacagaactaacacaagaaagctagttaggagctagttaaaaatcatcctgacttgccaaggaaaggtgctgaagacctgggtcacagagcaaatgcaaaacactaggactttgtccctagttcaccattaaatcaacttattttctcttaccccctcatattcacgtttactccttactttgtagtggttggacaaaaatcaaataaatctgagaattctaaaatgcacacccttgtttattttctaactcaaatatgccactgttgtctgtgctctgtcaagatttcaacacatctttttctcctgtttgcttttccttttggcatatagtgagtgtgtgtatacacacacacacacacacattttttttgactccttccaatgcccttctgctctccgcagatacacttctgcattctgaataaaaccgaatacatatatatatatatatatatatatatatatatatatatatatatgcacacatattttgaaaaccttatttgaaaagaaagctttcggaggaaacgttatttagccacttaatcgagtcttttactgagggactttttgtcgtcccctaacttcctgtcagcagtccacaggcagcaggaataatgtgggagaagatcaacaggcttatttcaggaggtcaggggccagtgccaccacctgcaggtggagacatcagaagcaggaagcagcccaccagctgcagggagaactccccacagagcctaaccaagatgaagggacttgtaaatttcaaccctcccttttggcttttgtgctaaaaatgtgaatattgaggtctgccctgattaagaactagatacattcctctttgtgactgccacacttccttagcgtattcattttttgtctttcgatctcaagttattattttcaaatgcattgcacgtatctaccatggataccattgcaattggaaggagcaaacgttttgtatgtttacttgacaaagagaagtgactgcccaagccacacagagttctgcacaaatcagtaacttctaacgaacgtttgcacttccgggcttgttctctacctatttcagtcgatgcatttgtattatttacttcaaactccaatactaataatgcctcaatcaggttgcaattgggatttgagcagccagaatttcagaaatttggtttggtccatatctgtgacaggtcagtaaatcagagaagcaagggtttggttgctattataatacattgcttacctatcaatttagttatcagccaaggtggttgttatcatccaaagtggctcattaaccaccttggagactcagtatacaattgcaagtaaccctggaagttgtaaataatcccaactgaatttgtatgagtttggtaaggttaagtggaaaccagctgcttagggccttgattataaatgaagttaggagtggaagaagtaacaaaaccccaggcaaattcattaaacattttttcccttcaactttatgctcacgaatgtgttgagactcttctgaatccataaaacacctttcagcatcatctgggcagcttgataaaggctgtagactgcctgcccttcatcccaaacctactgaatcagtgtctgtgtgtgaagacctagattctgactggtagttataccaaagtcttagaagcaactctaggccagtagtactcacgtcagaatcagctggagggtttgctataccacagattgctaggctagccttcaaagttgctggtccagtaactttggtgcaggtccagaatttgcatttctagcaagttaccaggtgatgctgatgctgctggccttgatcatgctgtgaaaaccactgctttagctaggctataagaaaccatataacatggacaaggcaaatgaaaaggttggaattcttctgaatcccaacacatttgtgagcataaagtcgaagggaaaatgattcttctgaatccagacacatttgtttaaggataaactgttttttccttctgaaaatttaatgtctgattctcgttcattcattcatcaaaagttatcaactatcaactataggtaggaactgtgcaatatgctggtgataaagagatgaaagacacagcccctcccttcaaccagctcctagttgaggtggcaagtcagctgtataatcaagtaattgcaagactgtgcactgaaaagggtgaccacagggtgtgatggccacccagggctgtggaatcagtcccaaaatgaagaatgaaagcagggaagggtaattcagaaagaagaaacagttcgcataaagacccatagataaacatcaatcagatgtggttaagacaaaagtaagtttctggaggctgaggaccttctcagctatatgtttgcagtgcttggtatagggctttatgcatctacatggaagacagaaagggccacatcacagtggacaaggcaaatgagaaggaggcagtatcagaagatgagggtacaccggagatcctagttatatatgggcattgtgttcatctcaggagttactgagtaatgggaccttgactcaaatgaatctcaagtctgtttttgcctaatcttggttttaggactaggattagcatacaaccgcactaggagcctagttatacgaaaggctgcattgcggacctgatacagttcaatatacatactgtcaccttgcaaatagggttacgttagttctcaagactgccaatcctctgtgctctaatccttttggcttttttttttttttttttaactgtctcactctgtcatccaggtgaagtgccctgggatgatctaagctcactgaaacctccgcgtcccaggttcaggtgattctcatgccacagcctcccaagtagctgggattacaggtgctctggcgccaccaggccctgctaagttttgcatttttagtagagacagggtttcaccatgttgcccagactgatctcaaacgcctgacctcaagtgatctgcccgctttcctttggcttttaacactatagagcaagggtccccagccctggggccacagaccagtacaggtcagtgacctgttaggaaccggggccccacatcaggaggtgagctgcagggccgccagcattaccacttgagctccaccttctatcagctcagcagcggtattagattctcataggatcacgaaccctattgtgaactgtccacacgagggatctaggttgtgtgctccttatgagaatctaatgcctgaagatctgaggtgcaacagttttatccccaaaccatcgcctcccacgcacctctccccacaaccccacccgcccctgatccatggaaaaattgtcttcctctaaaccagtctctggtgccgaaaaggttggggattgctgctatagggcgatggttttcacatttgatcctgcatcaaaatttccaggtgactcattaaaatactgattgctgtgccccactcgtaggagttctgataaggtagctgtggggtgagacctgagaatttacttttctaataagttcccaggtcatgctgatattgctttgataaccaaagcaatatcagctttggttatcaatatataaccaaagccacatagagggggagaagttccttgggtttagcccagtgtttactgcgaccaccaaaattgctggagcttaaccatggctcagagagttatgttctgttcactctgtaggctgctattccctgtcaccttttgaactatgatggaggggaagagctgccagctcaggagatttcacttttttctctgcataattgaaaatccagaaacacagggttttgggaaagctatagaacagatcatcagtgatcagtgtttaataaagtaaagcaataaactttactgtgtaaaataggatactttattatataaattttgtccccttcccccacctcacaggccaataaaataatatacttcttgtccctgggtgtaatgttattggaaacctttgaatgtaggagaggcatgggcttgtaagttgcagaaaactgctagcctaggattgagaatttcatggataatccaaaaatagatgattttacagttataagccttacgtgaacttgaggtaagaaaacacaatgcctttatagtcttctcagttgctccacatgccctctgagattctgttctgcccagcctctctggttgtcacatctctgggcattaacagaaagttcacatactctttgtctctgatgataatccttctaggtccatatagaagatccctatccaaaccatcccccaaacaaacctattggttaaatattttctccaccgaaggcactttcttagattctaagtgccctgtaggcaggcttcctctctgatttgggagagtacaaattgcgacaaggttaaatcatagcctgggaatttgacctaaaattcactcttctcccatatgcattcatgaaccttctgctggtttttaaaagaagctacttaatgtcagctcgaagaggttggaaggggttaaaaacatgagcatggcagtaagaagatttatgaaggatctgagaagattatgacttgatcagatggtattttgtcagctagccacatttgtgaagacttgaaaactagggaggcttgtccttctaagagggggcactgctgggacctggattctgtggaaccgtattagtagaataaacaataacctttgcttgtatcaaatgaacttctattctcatgtgtcttttgacatatttttattaatcatatcactgggacctccttgctgaaagatatctccgttccccattctgatgactcccaactaggagtgagatcaaatgaagatggcatggaccatttctccatgtgacagctctctgtggttgccttttaacacttctaatgccctttctcttaagaattcccatttgtcgtctggcactggtgctgtgatcaataaaaatgtaatggagtgaggcttagaaacatgaggaaatttactcaagctatccatttattgatgtgtccatttgtgttgtcagggaagaaaaactttttcactcccctcttaggttcattacttggggggctgcaaattaaactgacgacagatagattggcaatagaaaagacaaagtttattcagagaagtatgtgggagctcacagaaaacatagctcaatgaagttagaatttggggcttatgtactattttaacaagggttttgaaaagaagagtgttagaatttcaagccacaaagttggtgggaaatatgaaagaaactaatgaaaggtaatgtttgttttagtaaagtctgtttatgtaattttcttttcccagcgacaacttctcatctctggtgacaggagtcactctttacccctggtgcaagaaactttccttaaaggaggatttaaaacagttgaattatttcagaaatctttgcttttaggcagatagggggagtacagaaaaagccccttcccgtatctgttgatcctcaaatggctttagctcaaaacaatttttacatcacgatggcataatgtagatctcttcaatgtgttcatttattccacagatatttgtgaagtacatgatatatgccaggtacttgggatacaagaatacataagtatgtccctagtctcgtagaacttacactctagtagtgagctagagaataaatgatattatttattatatgcatacacatatgatttcagatagtgatccatattggaaataaagctggttaagggaatagaaaatgatattgaaggtggacttgtttagattgggtggattggcatggcttctctagggggcagtatttgagcagatatgagagcagatattctccaatttgggcaaaaacattccaggcagaggaaacaagggcaagggcactgagttcaaaagagacttgacctagccaacaaatagcaaggattccagtgtaagagaaggtggggaaggaaggaggtgcaagtataggcaagggcaagatcacacgggatcttgcaggccgtgataaaagaatttaactctttcataattttgacaggacatcattgaagaatttagaaaaatagagtggagatacctgatctgctttcttcaaagagttcattcatcattgctgagtagaggttagactgaaatggaagcaatagtgaatacagggagatagcacaggaagccacgttactagtccacatcagaggtggttcagactagggtggagtggtggggtcagttagagagctggtatttaggatacattttaaagacaaagctgacaggatttgctgtgatgaattagatgtaaagtatgagaataattgagaattatttctaagttctttgctggggaaaagtggaggaggaaaaagttagggtacaaggtgtgatgaaatcaagagtctctcttattatcagagtctcattagatatccaagtggaaatgctggaaagaaagttgggtagatcagtctgaagctgaagacagatactgtgactggaataataacgtaagagttggccggacacagtggctcactcctataatcccagcactttgggaggccaggataggagaattacttgagcccaggagtccaagaccagcctgggtaacacagcgagacctcgcctctacacacacacacgcgcgcaaaaattaatcgggtgtggtggcacatgcctgtagtcccagatactcaggaggccgaggctgaaggatcacttgagcctgggaagtcaaggctgcagtgagccgtgatcacaccgctgcactccagcctgggcaacagagtgagaccctgtctcaaaataaataaataaataatgtggcagtcataggcccttagatggtttttaaagacatgggactggatgaagtcttctaggaggagagtttgggaaaagagcccgagaattgactgcacctttcaaaacaggaggaagaaaaaaaatactcaaaggagacaaaagcaacttctgtgatttatagagaaaaccaggcaagtgggatgaagaaagtccttcatgatagaatcaaaaacagtgtcaaatgttgaaaatacaattagacaaacacaaaagaatagaccattgggttttgcaatatggagctcatacttgaccttgataaaagacattttcactggaagcatgcatcaaaaaactatttgtggtaggttaaaatgtagtaggaggtgaggatatacagacagtggctttcactgtgcagatactgctgctcatgcactaattaaaagacatttgttgagtatctactatgttgtatccattgctaaatagtaacagctgggtttagtcaggtagaacagcatcaaaatcattatagtatcccaagataggtacagtaaaatctgtgaaggaatcagagtagtctcttctccaacagagcgtaagacccagcttcacggagaaggtggtagattagctcatctgggaggctgagtagaagcttgtcattatagagggagaacatcagaagtgtggacaacagcttgaataaccttgaaaggacaaaagaggacggtctgccctggaaatattaagaagtctcacatgattagacacaagatattaggggaaaggcataaggtgaattgagtcaatgaggtcaaagagaagctagctggaggaacaggcgatcataaaatgagtaaaagtatatattcaaagattctttttagaagggctacacaggatggataaggggagagagagagttgaggcacagagacaaattggaaaggtgcaatcataaccagagacatgaaaaacccatagaaatctgatgtagattatgtggtccccaaggttgaacaattaagtacgctttcagttgttatgcccatgatattaacatattttataactgcaataagtgctgaagctaaagataaatacaaacaatgtaattcttattctgtgagaaaatgttgtagctggaagttaaacatgtttcttagctaaagaaaaatattgtgtgatctggattacttaatgttataatttagcaacaaaatgttgacattgagccttgcataatcaaaaaagtagtctattcaataaccacattctcagaaaaaaaacaagaaaatattagaaacaatgataaattatcgtagtaatttaattcagtattctattgttttatttggatttaggaaaggcagaaatgttgaaatattaatatatatccctgtaataatataatttgtgtctgagaggtaggaatgagggcatgaggtcaaagtttgataatgaacttcaaagctataactatgatcaggaaattaaaattggacaataaattcctagaatcgtcaggagttgcttgtgaaatcgagaaaggaaaggatatacacaaaaataaagaacagccaatgctctcaaaggagtctaacttttataatagtcttctgtgttagagctgaactcttctggtttagaaggacactctgttgcctggaaatagggcatggaaaaagtcatcagagtcatgtcatctttcattcttcccatgaacgaaatcgaggccctgaaaagtcacctgtgtttgctgtattttattgcaactaagatgtgcatttttaaattgatacataataattgtacatatttgtgggatacatgtgatattttgatgcatgcataccatgtgtaattatcaaataaggatatttctgtatccgtcacctcaaacatttaccattgctttgtgttgggaacatttcacgtattttattatagctattttgaaatacaaaatagattgtcattaactatagtcaccctactggatgcaccttgtttttaatatttctgaaaacagatacgtctcataggtgatggtgtcacagctgtgcattagttattattgcctgtgcaggtgcaaacgtaactattcatattgttgtcaattaattaaatagttacatttatttatatgcgtttattatactaataaacacaatattgagatagttgagctctagttttgactctgctgttaactagctgcgttactttaatttacttaactaatttggctttcaaattcctgataagtaaaattacaacatgagtttctcctgctataatagcctgagaaatcggtgaaacacatgaattcagatgttgatgctatttaatagcgggattccagatatctacttgccattatgggagggagagaggaggtggactggaggctgtgatttccctaggaggttgttaaaattggccaggtgaggaaagctgagacagaccataaatatgaagcatgatacctagccctcagtgttgaaagaaaatcaaatctcatctttgtggtctaaatatcagtatgatacaatcctctgtgtagacatatcctctgccctattgttttctttctaaaagctaaagcccaggtgtgatcacatccctccgttatttacaaatttctgatgatgatgattcttctaatatctacattccttaccattaccatgatgtccaaaacctattataatctattcgtctccaagtgccatgttgtggtcaccctatgcaccctctaaacccaccatatgaccttcccgctgctacttgaatacagttggccctctacctcgttgtgtctttgcattgcctatttaattgcctttccattctctaaatcactctttcgctggaccagcaacatcagcaccatctgggaattcattagaaatatagatcctcaggcctcatctcagacctgcttgatcagaaacattggagagtggagatgagcagcctgtatttttatcagccctctaggtaatttgatgcacactaaagtttgagaaccactggtctagagcattcttctttaactctcttctaaaaattattagaatgaattcgagggacgggatctccttgaaagccaagaacatttctttgtcatctttctgacttcagggcgtagtacactttttggcccataattaaagctcgataaatgcattctatgccaataaatcagctaatcaaatatattattcatgcccttgaggtatctgaaatttgtttgcagaatgtaatatataactatagagtaacaagagaataatttattgccatagataataaaacaatatcctctgtataataaatcctagcctctgctcaatgggcaaaaacgggactggggtttcagattttaaaaagattattggtaattaaatcacctggagaagcacttgctgcagagatgggacttgaagcatcataataaactgttgtttattatgattcggtcagagctgatggaatcacagggattgtgtgaggtatggaaagtggttgacattgaattccaggctgcacagttgggacttgatatgataaccaaaaagaaagaatgtctggggtggtagcaagctctaaatttagacaatctaggcttatcctaaggagaatatagatacagataactgaagtttgattaaagggaacctggtgtatcacaaatagtaaaaagctgtagttagtctatgcagctatcagctagccacataatacttttgggcaaatacattataaaccaaaagaatgacatggcttatctctgtaacaaagtggctcattgttctttattctactgttatccttaagaaaaaaattttagtaaatttgttatgctatactcaacttcaagaagggatagcgcttataaaaaaattgtttaaagaaacaggcctatttctctttgggagaagccacggagaaacgaaaagaatggaacgtgtgtttctgcccagatggcaataaaatgtagggtaaatttctgtcttttaaaactgtattttttccatccctctgtatatacacatatcctaggactgttataaaatgctgcatgcgtatgtgaaaatggaaccttattgggctgtttgatggacctttaaaatatatttgttggtttggggtacatactagctatgcaatataatccgcattatttcttatgtaaacaatggataaactgtttcacagtccagacatttatttggtcactgtttgtagaatgtctattttatttacttctgaatttgtattccagagatctgccttcaatgttggatacttccactgtaatattctaggagatgctcactttctttttcagcatctgacacagtaccatctgcctcctcttttcttgccacaagtaataacaattttataaaggaggatcacattacagaattataggtggtaaactttctaccaccagatttacccaagaacctgaaacacattttttcaaaaggaaatagaatgtccttcttgtgactacatcggaattttgcttgcagcattatgctttttttttccccctagtgtagctagccatgtggaactgaagccattagccagctcctcatcctataaatgctattacctgggaaaagaggcagaaaatatactctcttctccagttagagtctaaaggaagagaacaatatgggtagttgtgtttaccacaaattgatagaactcctttattttaaatgctaaaaccaaataacttgtttatatgacttcaacattgactatcacacactgttgcatgataacagagtgaaaactacctctattggatttaagtggggaatctatgtctcattctcattctttttttactgtggaaactagttgattccaggatcagccttagctccaacttgccacactttgagttttggtttttcacttgcattgtcacaggaaacttctataggataaatcgaggaagattttactctgcaacgtgttgcagaattaaacatttaaagtggcaaaaccttcgtgtgtaggttgtctccccagagaatgtaaaaatgaattgaaggcagcacctaataggtaaacgacagccaatcaaacaagaacaaatgaaatttgactggcaaaatcaaattgaaaatgtataacgctgaatctcagaatataggaggatgcatagaaactaagctgtactattataaaagtcatagccattgaaaaataatgactggttaatttggttttctttacctcatggatgtgaatggttagattttgatgttggtgttatttgacgtgtgtttgtcaagaagttgccttagtcggctcgcatttaggataaaaaaaatattttaagaaatgtttaagagattatgttggagacattagaaacaaaataattatgcagagggcaggactatcaaaatataatagaaaaattacaccgctcttttatgatttcctcctttttggcatttaacacaaaactttatgattacacacaccacgcactccagaaatgcttaaaggaagatgagaggaaaattcaatagaagtagcaggcatttctgtgaggacagcagaatgatcacttcatctctgtattttttttttttcaaatttctgtatctgtacaatgtcttttccagctctaatattctgtgatttggtaatttccgcactcagattttctttaatgaattttgtatgatattacctatttttataccagatattacctggctctaatttctttttcaccctaggaaataaaagtatcgggtgaatttcccattttcttatgttattgatacaggtctctgttggatatccccacgattaactttcctgcagcatgttcgatggtggcttaaagaagaaaccatgtatcagagccccttgtctatatagacttttagataaagagaaatacatatcacagaattattctgggcgcatagagtctctaaatgcaaaaaaaaaattgtattgtagctgttgattcttctcagatagattgagtgtagagagagagcattccaaaaactgagcagaagaaacacagtctgaatcaaataacatgaaattttagctaacaagtaaataacacttttttcagaatatgcaaataatattggtttattatgaaaaatgtataggctgatagatgagcatagagaaaaaattataaatatcttctttaatatcactttccccagcaaaccacttttaacattttgatacattttcatgttcaaacatttcctaatagtcttttttcctgttatataaatatgaattttaaacattcgtatgtttatgaaaaggcaataagatactgctcttttataacaggctttctgaacttcacaacatgcagtgtattctaacatgctccttgtgttcttaactaataaaaaacctcacgttatttaaaaaaccatcttaaacataattatccattaagagaagaggttggggtagagagtttcagactatcaatatcaaagttatattttctgtaagtattttaatttttaagtgtagctataggtatatgattataaaaccaatagcagagaaaagataccacctttgaatatagttttccttggttccatgaaaatggcctcctttctttttgccagtccctcagtatcattaactcatttttctgtaaatgccatcattgtatcacatgtcctcaggaaaaggcacttttctcttttaagctagtgtttgttcttgttctaattttatggcaatttaacgagtaacaatcctgtttctataaatactgtttcctaattaatctattgcattctatccatgagaatttagatgactttctttgtaagagaaatctctgtagcatgagattcttctttgctcttaaatttcattctttcacatttttaaatgacctgatagtattttgttgtatttgtgctgattttttttaaccaatcttaccttgttgaacatgtaagttgtttctaatatttgcaatgatcaaaatgtggatccaacttcactaaagcgttaagaatctaaaacaaaacaaagaacaaaaagttggctgtcatcttgcttggaccaccccgtgagttactattttcttgtttccggtcacagttcatcctaaatcatttcagtacacaaaatgttttttaaagtttgggacagggggtagagaatgtcaattattcctccaaggcagtcatatgagcattgagtatcatgtggaatagttgttacttgtaaagttatggggcatcaaacccagtcaatatgtttctggaattgaaaaagtccctggacattctaatgatactgttgttcactttgcacctactgttaccactactttgatctgtcaacactgcccgtaatggttaattttgtgcatcaacttgactgggctacaaggtgcccagatatttggtcaaacattattctgggtgattctgtgcaagtgttatcagatgagattaacatttaaattggtagactgagtaaagtagattgcccttcctaatgtgagcagacttcatgtaattaattaaaggcctgaatagaagaaaaacactgaccctcccctgagcaaaagggaatcgttctgcccgactgccttcaaactgggacatgggctttttcctgccttcagactttaaccacaatattagctgttcttgtatctcaagtctgctctacttcgattggaactacactatcagctctctcgggtctccagcttgcttgttcaccctgtataccttgggagttgtcagtctccatagttgcctccataattgcatgagccaatttcttaccacatacaaacacacacagagacacacacacacacacacacacacacacacacacatataattatatatgtgtgtgtatacatattctcttattccttttgtttctctaaggaaccctaatatactccttattactctttctactgccttagagatcttcaaggccaagagcgtaatcctccatcctggctctttttcctaatcattaatgatcaactcatagccatttagctcaactaaaaataatttgttcatgaagctttacactcccacatactgaggaacgtggtacctaagatcaaacagtcactgcctcatcaaatgcattcctcttcaaccccatacaaatgtccccagatggaactcacaccataaaaatattagatcccattgacttttctgctttctcaaggatcattgcagagcttgaaaaagatggctcctccctttgcctaagcaggttaacttggtgtaaaagtacatgtaagatttggcacaaaggaaaataaatcagttttgcctgggtcctaagaaacatttccctctgcctcatggtaattgtacctgccagttgattgcattactcaagtggagaccatgaagtgaagtggtagaacaagaagaaatccctataattttattaagtatggtgaaaaatacagatatgtagagaaatgactgggattagatggagcaaaacataattcgagatcctgatacaaattgtacttcctggctcaagggagggagcagaacattccctgctacatgggaataataataaatgcctgataaaaatgcagatatatcatagactacagaagctgaagtggattcttatggtcccctactcagacagcctctccttcagatgaagaaactgaagcacagaaagctcatcctagtgtttcatattgaaaaacccattcaagtctattttaataacctgttaccaaaaatgagggaaataatttaactttaatgtttcactttgcattacccttttcctgactagacttctatccttttcttgagttgagctcattaactactatgaaattatggttatgggtagaggttaattttatacctgtccatcttctggcatcttatttacactaaaaatcatttttaaatggcttcattttaaaaaatattatttcagttgacattttaaaagacacatcatttatgtactacagaatatgcattttatactctcctttattaattttattattttccaggtagaccaatcaaatgaatcagaaattcttggttagatctattagacagcataagtatgtttttcatcattaaattaagatgaaaacacaattttactttaaagtgtttgacgtttccagcctttataaagtcaacacttaatcacatctgaaatttgcaggaaaaaattttgaaagccttcaattattaacattatttcgggagaaaaagccactttgccgcagaactttcacttttctctcgtgaattaagtctgatacaaattattcattatggtgaagtttaaacataatagagtctagctacttccacaaaaatactattcaatgagtttctacattgacatctaactgaccttgtaattaatgttgtacacgatccttttattatatgctggattatcaaatatgacttattagcagtataaagacacaaagttctgaaatgtaatttatagccatgaaaaggaactgagctttgtgtgacagttaaatttgaagagatcaggtgattattatgaagcatgaataataatgcatattaaactcacgtttttgtttaaatcattaatatgattgttttagaagaaagtctacctctatcatatgggcaataaaatgtgtataagagcaaacatttgtgtatgtgaaataactcaaattaaaaccagttttccacattaattcttacagtttttaaaatttaaatcatttaatgtatcacacatagctttattcattttaagctataaatgttacaatttctgtttaagctgttaatataagctttgtaagagcaattctgtataaatatagaattgtcattattcactaatagctaccatttatttagtgcttgttgagtgcaaaagtactgcactgagatctttgcatatgttctcttaatgttacaattcttacctgaggcatttctgtttctgctggaatatggtctctctgaattgaacaagggaggcatttttggttgttatgatgaaaggtggacactgctggcactaacgtgtgttggtaagcgactagactcttcatgatgcgtaaacagtgtttcctcatacccctgcacattcaaatagaggaaaaccttgtttatagttaatttcccctagaatgtaaatccatttaacatataaacacaaagcgtgttttgtgtggatgttttttactggagcagggagacaggagaggaaatgcagttttgatagttgctgaatttttcaagaatgcagcaattatagaacaatttctagaagtttcctaggagctcttttccatagcagaaaactaggacttaatagccttgcgactcatggtacttgagtgttccatacaactcacctatattcaggggacatttgaaaaattctacattaaaggggattcttaacataggcgcaagtgtctggcatcttcaataggtcttctggtgtggccatgaaaacattcacacgtttcaaagtattttaaaataaaataaaacatatattgttgtgttatgaattattttctttcttttttatatgatggttagatcactgtgcagacaagtttatgagatctattcatttcatttcagggtggtaaatgagggtgttactaaatgttggttctaaaaagggagacattgggtattacagaattcagaacagctctaagccctgtgcacatttagcattagaggacacaggcaaatctggcctccagtcctggcagcttcttcactatgtatatgatgttgggtgggttgctttacctctctagtttttacttttatttctaagctagggctattcatagttctttatcatgtggttactgtgaagtagcaaagcacctgacataattagagcagataaaatgctcaacaaatattgcttatcagaaggattatgtattacctcccgaaatacatcaaaaatatattttccaattcaaagaatatgtagtacaaaaatcatgcctaaattaacagagttgcagtagcccaaggagagaagataatcattattgatttcttcttcctttttgctaagcagttctctgtctctgcctcctcagttgttgtccatcccactcccccactcccaagccctgaactctgaggggtttgctgccgtggccggttctgtagtcattgctgtccaatgatgaaaacacaaaatactgcaacagaacactatgcctgtcagcttagctcccttctttctgctaaatgacactcaatcctattcttttgttctaaaggatatcctaaatgaatagccactggggggaaaaaaggttatataagattgtgcactgtgtgaaactgatgcaaccagatcaatgatgtgaatttctcttaactatttactgggatctagaaacaggtctctcaacttagcagtgtttacgaatataataggccttccttatacatacatctgaagccaatctgagtcaggaagagtcgtggtctgataaatattttgaaaacttgcatttgttctattaaagcaaactgtttattaatagtgtgccttattttttaaagcaaaacatttataaacagtagtcattacaggcacttcagtgtacggagtgatcaattgttagacctttaggaatcgattgtttcgtggagcttcggcttataattgaaatgtcatcagaaggagtgtaagacatagcttcaggagaggccatttatgcgcttttgttttcagctaagttatagagtcatcatgtgaagaaagattcttctcttagtaaaaatcctttaatggttggaataacacttgatatttaatatttctttctactttatatccacatttattcaagtgctaacgcgtgtggggcagcaatgaagcactttattccaacattatagttctcatatctgcgtatgattatttttcatttatcgttagcatatatataatgatgacttttaaagtacactgtattatattcactggaataatgattagctattaataatttgaacactatccaggaaattactgaacatgtcctacaagataaacctcgtatgatattgtctccaaataacagtgctaaccaagaagagtgctaccaagttcaaaagtaatcacagggagtaacctaaatgcagctccgttgggttaaaaatagtttctctaaattatatgttccctaagtttgagatcgatttctacaaggggataaaatgtttttataaattctcagtgataagtcatgtgattaagaacccccaactttttttccaaagacatttgcatctctgatcaaaataacaagatccagtcttagttataaattggggaattttcatcaaaataaggagctactcgttgcataagaagactagtacaacttaaagccaatttaatttcaatgaatgcatgatcagctccattgccaattgagtgtttttcttattcatcagaagatgggttcatcatcgtgtttcatatcaactgttctcaaaccatattgcccatttaaataaatatagatttgtctcgaaattctaaattcatgtcatatttcataaatagcctatggtcctatttattactttaaaatattatagatataatatttttattctaaagtaactgtgttatacaaccaaattattcatttaaatatgtgactttttaaataagtaaatgacttatttaagtaaagtcattaaaattttccagtctgtccttcatccacctgatctttgaatgagttaggaacaatacaggaaactaatacaaacttaattttgattacaaaagatgaaatcattctgttatttattcaacacactatgtgtcaataaaatcttatactgtgaaagaattcgtctaagtccatttgctgttgcttgtaacagaatacctgaaaatgggtaatttacaaagaaaaggagtttacttcttacagttacggaggctgagaagtccaaggttgaggggccacatctggtcagagccttctcccatccaagtactaaccaggtcgaacctcacttagcttccaagatcagataagagtgggcgcgtttaggctggtgtggctgtagacttgttagagcctttttgctcatggggacacagcagagccctgaggcagtgcaggacattacatggcaagaaggctgagtattctaatgtgttcatgtctctcttcctgttcttataaaatcatgaatcctactcccatgataacccattaacctattaatttatgaatggatgaatccattcataagggcagagccctcatgatgcaatcacctcttaaaggcacaatctcccggtgctgccacgttggggattaagtttccaacacatgaaatttgggggacacatttaaactatagcaaaattgtaataaaatgttatatagaagcaatgttcttactgattataattgttatattggtaaagtgttaagtcctctaaccaagggatatatttcagcttattataatagttttaaatttacaattcaatatgaataacatctggtaaaagttcttttcaagaaatgggaaaattagaaatgtttagaagaaaataattcaataaatattaagttcaaactggattcatagtttatgtgaaattctgggaaccaattgcaaggggagaaaatagttacaatagcaatggtgaggatgagaataagagcaggtatcaacgttaattgagggtgtgttatagttctaatcgtgctatgcccactacatgacttttccctgtgtgaggtttccgagcttcttcgtagtaatcctaaattgagctggagagaggctagggtaacttactcacgctcatagagccatagagtagtaaaacctgtatttgaactctggcctgtctgacatcattctgtggtcttttaaaccaccactgcttctccatattaaaactccaaatctaggtgaaaagaagaaaactcagaacatgttctgcaacaaaatataacaaaatataatgtatataaacacttatacataatatcactaatatctttactatgaaaagactctgatacgaacattttacataattcatgcagaagtgttaatcacattgtctgtgatgagctgtgtatgtatctgataaaattctggcaaccagacatcaactcgtaggcatagatctgtaacactaaatatttgcctcgagaaacttaaagaaataaagacaaatgaatgaataggaacatggaactgagtacaagataaaatcctcctaaagcaatcgatgtacttgctgctgcgttattgttctaagcaaaagaagcatggcgaagggagatgtgaagctaaaaacagaatgcttagaaggagatgatagcaggagggaagcaaagatgggaccaagctcccaaaaggcgggctttgaacaaacaaaacagaaagctaagcctttgacggatgcacgggatgcaagaaactttagtcaggaaagaggaggcgaagaaaaaccctccaaagaaaaggtgaacaatattttaataggcaaattgacagatagcaagagatatataccatgctatgttttctcattgcagctgaagacaaactggggttatttatgctttgaaaaagcgtaaatctaaaaaacaattgtggaggaagaagcgatgaaaacacgtgttaatacagaaaacatggctccaaggctttaaacttccttgtgagataaatgcatttacattttccgtagtagctaatatatatatatatacatatatatatatatatctgggaaaataatacacagtgattttctttctttttttcatctacttatgtgagaaaaaagtaggctatctgaaagcttttcagttaaatgaggaagaaagttaggtgatcttgtaaataatatatatgttcaagataatgtaaggcccttgtgtagttttcaaaacttatctttaatagcagtttcttctggggatggggtagttcaaagttgaaatgttagaaagatgttaactttttttcctttttacttctccctttcaggatggaattaacaaatttgattacaaatagatctcagagagaggcaaatgcattgaatccagaagtaacataaaattagatcatgtttagttatgcccgaggtcacatggtgataaaaatgaggataaactgaaattgtctgtgagccagattagtttattttatgccagtcctaggaaaaagacacatcatggtaggatacatcctttttttttttaattatactttaagttttagggtacatgtgcacagtgtgcaagttagttacatatgtatacctgtgccatgttggagtgctgcacccattaactcttcatttaacattaggtatatctcctaatgctgtccctcccccctccccccaccccacaacagttcccagggtgtgatgttccccttcctgtgtccatgtgttctcattgttccattcccacctaagagtgagaacatgcgctgtttggttttttgtccttgcgatagtttactgagaatgatgtattccagtttcatccatgtccctacaaaggacatgaactcatcattttttctggctgcatagtattccatggtgtatatgtgccacattttcttaatccagtctatcattgttggacatttgggttggttccaagtctttgctattgtgaatagagccgcaataaacatatgtgtgcacgtgtctttatagcagcatgatttatagtcctttgggtatatacccagtaatgggatggctgggtcaaatggtatttctagttctaggcccctgaggaatcgccacactgccttccacaatgaacagacacttctcaaaagaagacatttatgcagccaaaaaacacatgaaaaaatgctcaccatcactggccatcagagacatgcaaatcaaaaccacaatgagataccatctcacaccagttagaatggcaatcattaaaaagtcaggaaacaacaggtgctggagaggatggggagaaataggaacacttttacactgttggtgggattgtaaactagtacattcttaacatcaatttattcctaaaagcaatgttcatagggcacactgtaggccatagatttgcctcacaaatttaaaggcctaagccctcaacatgcacagcagtatactcagagactatttgtaaagatgacgattctggaactttttaatgaccccaatcattagcaatgattaaaattaatattcaacattctatatttaccaaggcaataaagtagactaatctattttaaaagggttttaaaatgaagagatgaaacaaaccaaatgattttgatttaaacttcatgaaaacataagttgcattaatcaggtgattttgttttatgagcattctgattgaagtgatcatatttagccccgggagaataagagaaggtaaagtatgggtatggcactgaatttactgagatgattatattgtttgagttaaagaacttgtattaagaaacaagtatgtgccaaacattgtgctaggagcaagcaatgctaaaattacatgggtagaaagagagaatgaaatatctagaatgagttagaaacatcagtgttttccaatgtggagccctgacttcacatgaaaattctcattttcaaacaaggtagtttatgaaaactggactattagcaagacagggtgggcatgccatcagtatagtacctggtgtaaaactagaaattttaatcatttgtgctttcattttataatcagtaaaatccaaggtaggacaaacttttactttttctgtataatggactgatatttgaattatacccaactttaattttttgccagaaattatgctttattgtttctctaaaatggtactatagatctttatttatttctatatatttatatgatttttacatatatgtgcatttacatgtatatacatccataaactatatacatatatacacataaattacaaatatgtgtacctacgtacatatatatgcatatatcacgcaaatacaggcacattttcaatacccctttttgatttttttccttgaagagcatagcatctgaatttattatggatttatttttaatttatggtcatgttctttgagtgcttttggtgtttatctggttgccccaaactcgctagcattgtaaagaagatgtgcaaagcctgaatctagactgactttcatattgactttattagtcaaaaaaagtagatgaaaatgtaacagtccgtgttaaaaatgggaataagacagatgttcaagccctagcttcagcagtttttagctgagatttactggaagaaaacattttctgaactgtaaaacatgcaaaatgcctacgtgacagacttcattaacattattaaatgctatgatatagtaaaagaatttgtaaactgtcaagtgctttgtcaacattaggaatttagttattataggtatttccatatacatgttgtatttagaattccctttaattttatacttagggttgatttgtattttaactaagtcactttatatatctggtcccattatacaagtatacttttccttaggataagaaagtgatctttatatatgtttatcaacccaaatgcccatcagtgatggactggataaagaaaaggtggcacatacacaccatggaatactatgaatccataaaaaagaacgagttcatgtcctttgaagggacatggataaagctggaagccatcatcctcagcaaactaacacaggaatggaaaaacagacaccgcattttctcactcataattgggagttgagcaatgagaacacatggacaccgggaggggaacatcacacaccgaggcctgtcgcgaggtggggggcaaggggagggagagcattaggacaaatacctaatgcatgcggggcttaaaacctaaatgacgggttcataggtgcagcaaaccactatggcacatgtgtacctatgtaacaaatctgcacgttctgcacatgtttcccagaacttaaaatttaaaaaactttaaaaaaagaactgtagatactgatccaaaaaaaatgttcattaatgggggttaaatgattatttctaagtagactactcttgaacccttgaatctttaagaattttctttgctattgaagccattcaaactctattttattaaagctgtcgttattctagtagattttaaacagtaatacctgaatacattagaaatatgcaaatctgcattacatatggcatctgcagagcagaggagtttggtcatctggactcatgctaaagtctccgaaaaatccgcttgtcttaatgatggttgactcgctaatgctatgcgtatatagtcttattttaagtgattgaatgatgtggctaataacccctctgttagatgcactcagaacctcacctacctgggtcctcagctctccagtgaaatctctactttaagtttattttctaacatggtaagagccttcagtttatgttatgctcaggcccgtcactgtgaataaaatattagaaatggactttttttttttgtatttttttaatggatcccttggaactttaaaaaaattatttatttgagctttctactgttatcacagtgtctcctaagcatggcctcccgttttttgttggtaatataattcttacgttattcaaattagtaaccattatttttctcatggctagaattctggaaactattaggaaatcactgagcataattgaatggctgtttatttgaagagctatgtcaaggcagcatagagttgtattttcttgcaggggctctggagtcaaagagcctgggttcaaaccttggctccaccactttctatctgtggggcattgggcgtgttacatttgtgaaacttttgtttctccatttgtaaagtgaggtttgggggatgattaaaccagataactcatgtgaaatatttaatggaaatgtatttggtaggggatttattatttttaaatttggattgcacatgacacatgtcagggatcatgctatgcattttggatagaaagatggctaagatatcatgcctgactcttaaaaacttacctaatggtaaatgacgagttaatgggtgcagcacaccaacatggcacatgtatacgtgtgtaactaacctgcatgttgtgcacatgaaccctaaaacttaaagtataataaaaaaaaaaacttataatcaactgtagtagaaagagatctgaatggcttgccatttagctaggcacatggtatatgtgcttaattcatactagcagccactacagttgtcatgattaataatgagcttccaactgcacagaatgcttttaatccatagaaaatcaaatcagaaacaagtttttgtaaaattaatgtgaaaggagcaacaattaaaatgcaagattgacatttattttctaaattggttctattttctttcacatttacaaaatttataagaaaattctttatttctatgtgatataaagaactagaatgtactttgatgtgaattattgttgccagtgctgttcaacttttatccataatttactaagcacctacatttagacaaaggcattatccatccctttggggaggatttcagatgattcatacacagacctggtctcgaggaatttaagattttctttggggagggaaataaggactttaaccaactcaagagtacttagagaattttctgaaaataattttatcaatgaaaacttgttatattaaaagaaactgtcattctgacttccacaaatctaggcttgaaactatggataacgagatattttctattactctcactcacgtcattttcacaaagtgaaaaggtacattttaactagtgaaagaatagaggaaatggaagtagctcgaggcagtggacgatgattcaaaaagacagggccctattatttgatcaagttatgcaacgactctgggcctgtttcttcacctctggaaggaggaataatctccaagccctttcagactcttttggtaattcacctccagcacatcttctaaatgccagcattaactgtcctctgatttgtctcatgtttttctagccccatgctctcctgttcgccatttaccctcatgcaaggtacaaattacacccatcatcacaagacacttgctcaagtcccattgcccccttgaagacctgccacacctactctctcaaaaaccatcatttcctgaaagtcctatacagctcatttggtatttacagtgtactgccacaagccactaagcatcgttttgtgaatacatgacttacagacttagcttgagtaaagatacttgaaaatgaacaccatttcttggctatcttcctattttgatgtacccttcaggcctatgaattttagtataatagataaccaataattatttcttggttctttcctgcacatctgaataaccctatgcaaagtgatagaatgtttttctataaggaggtcctacactggagattgtgtatttcttaatgctgttgaaggaagagatgtgtatctaaaataaatagactctaacaaacattaatttatatttctattatctgttttgtgtattgagatatctcacaaaaataactaaacattttggcattattgatattacatatttgccatgaatatttgtaaatgaagaaaaatatatatacatcagtaattatcttggcaaactcttcaattatgcaatattgttacatagattacatatctaagtgaacactggagttttaacaatattgtgtgttcataaatgttttatttattattgccactaattcttattgccatttcaagaactatgtataagttgttctaaaaactattaaagtataggtgaccatggtcactactgcctactttggtaaaggccaaatatgtgaagactttttaatgtgttaacaaacgttgaaggttttttaacctgttaacaatcagtaggactcttgaaattatttcctaagagagtaaattttacaacttgcaaagcatgattaacctcttgtaattataaaccatctcttgtagttatgtagcattttgttaatgagcaaagaaccattgtggttcctttttacatttcttaaaataattctccgtaacctcattgatatctccagtaaatttagataagcttttttttttaaaggagggttaaaatgacattttaaactaatttttcttgttagttatacagagttgaactatctgagggttttattgacagtcataaaaaatttgttattttctgtgaaatatagagaatttaattcattatcatattattaattctgtgggccattgtcttaattctagaggcacaagctgttttcatcccactgaaatagaggaatcaaagtatgttccttgctcaaagcacaaaagtgacatactacatagtatgcttcttgagtagtcgtaaatctcatgtgttaaattacatcccaaagatttcagtatgttttatgactttaataatttatggtaatttctaatctggcctttgttgacctgtcttgctttttaaatttttagtttttcgacaaaataattaacatattttaataatcttccaaaggtgtttaaaatggcattgtatagagatagctgaaggcttttgagcttctgtgttgtaaacactttcttaataaaacatgaattgctaccagatgatccagcaatcccactactgggcatttatccaaagaaaaggaaatcagtatctttgaagagatagctttgttcccatgtttactgcagcacttttcatactagccatgatatggaatcaacctaaacgtccatcagtggatgaattgaaaagaaaatgtggtatgaaacagaaattgctgctttaatttatattaaacacactcatattcttctcagctgttaagtattgagttatagatttaaagaattctattgtgaagactaaagtgactattaaagtaagaaattattttttccattatatttaacttatttcatactttaatgttagcgccaatgagcaagactattgaatacaaaaactaattaagtagtggtgatagtacagtatataagggagaacattcttttagaaaggaacaataacagggagcaatagaaacaatgaatgagtgtaaggtcacttagtgttaaaacagctaaaatatagtacaaataagttgcgttttaatagtgattttatataattacaccttgatgttttatttgttacaagaattgtccaggaagatttctctaaagaccaaaggcactcttcccctaaataactccaaagccagtcctgtgtttctataaaaaaaaaaaaaaaaaaaaaaaaaaaaaaaaagtgaaaataacgtgatgaacatttttgaggaagtataaaaccaaaatactccactgcatagctgtttctgcaggtattgtattgatatattacattattcagctttggagtctccacatccaatgttacatcatcactctaaattaaacatgtatagataaatgaaataaatgagatagcatatgaaaatctcatagcccagcccctgcactatttaaaatagaaataccaaagaattgtattcctcatctgaaagctatttagtggtggtgtttcaaataaaaattccatctactgctgttgcttccattgtatctttttctctgcggtactgaaagagaaagagacccagaaggggccttgtctgaagtgtccctcttttaagctgttgctgctttaagcacagggtggacaaatgtaataggagtttcataaaggtggaataaaccagcggattacggtgtgggtgaatactttcagatgttaaccaggagctctgcttgcatgctgggagttgcccatgcctcttctagattgaggcacattatcatgcacaacctaactccaagaaatcttttaaaccactggaaattgaacccagaacatgtctctaagccagccttttcatcctgacaccgaatcatagcatgagccagtctgtcagggatgctgctgctctctaggcaaattttaaatgttgaaataatgaatcatgttttcttgaaaaccatgtacaccaaagaaaagttagtcattttatagatgatgaatattaacattttcttagacaatctgataaattatcagatctcacttttggctctttttaagacagttatgcctcagaaatattaataaacccccaagcccttatactgatcagtatgttcactactagctatgagaaattcttgaagttcttgtaattattgtattatttccttactttcattttattagtatgtgaataatatttttaaaaattctagtgtatgtcttgtatatattttaacaacatgacttttaattaatgtcttgataacatttcttctagtgtatgttttcagtaacatgattattaactgtaactttaaaaacctgtggattagatgggaccattttaaaatgttttaaacctggaaaatctgatggctttaggtttagttcaagctatagatcacctgtggagaatggaactgccaaaaaaaaaaatagctgtagcagccctttgagtattctaaaatagggatgttatccagagcattggtttctaaagcttccattatttattgatgttgagctttcaggatttagctacaatatttactcaacatctaagccatgcttttttatcagtcatgttttatatcttttataatcaaactgcttatcactgaaaaaaatatataagtttctatgtatctggaagaattctctggtgtttcttagatatggattttgatgtgtggaataagaattcaattcaaggataacagagatgttgtcctgaaaaaaatcgaagaaaatcagcttttctttaacattctgtcaaagctcctgactattagtttatcagcactgttttgccaaaggtgtcttctcttctcttctttgaaaaaaatcatctgctgctgctacgccgcaagtgtgttcccgctgtgcctgagaagatgtgtggcataaaaaaatgggcatggcctgagttaaaagtgctacatttaagccagagctggcttatttattagttgtctaatcataggaaaatgacagagcatgcttttctcttgcaatatccgttgctgaaaattaaacacatgagcagagctttcagagaggttgactggcctctcagacagcacctcataggatggcctgtgttgaagcatctcctttaaccagggtctgtccctcagcattgggttggctcacctagattggattgtcccagcagaaaaaaaaaacccaaaattcagaatcatatccaaaccggaatactctttcattcacattacttgtactaccttttcagaaactggatacctgagtgtgtgagggtaacttagaaacttatctcatggttagaagttttagaattagagagcgatgatcatgaaacggacttcatgatcagaagcaatggagcaaggaatgagatgtctttgaggagtatttccctgaggctgtggataacgctgacgaataatccccaccttaaaagtgggttgaccactctagtagctgtaaggtgggagggttctttcttcagagataaatctgtgctcttcacttgcccatttcccaggttttcatgtaggtagaagaaacacctgtaatctgaagacactcttccttcagctttgttagtgacagggatttaaatatgtctttcacacattttccttagatagttaaatttcacttttcctgtttgtttttctctgaaggtattctaactcccctcctaatggacttctagagctttctaattctatgcaatttctgttgatttgttctggtaaactttgaaggtaatctctgattcaacttcttggagattctatcatgtcatctctgtttattaactttatgttactcatggtttcttgatgaggactcattaaacataatgtaagtagaaaattattaactacataatatttactacgggttgttatttctgatagtagctagctgtaagattccaattgttcttcaaatctttgtctcagtgatctctgtgtagttcttgactacttcaaataacttcctagaaggatagggatttaataatctcttaataggaacacttaacacactgctggtgggaacgtaaattagttcggtcgttgaaagcagtgtggtgatttctcaaataacttacaaaagaattaccatttgacccagcaatcccattattgggcatatacccagaggaatagaaatcattctaccataaagacatatgcacgttgtgtatgttcattgcaacactactcacaatagcaaagacatggattcaacttaaatgcctatcaatgaacagactgaataaagaaaatgtggtacatatacaccatggaatactatgtggccatgaaaaagaatgagatcatgtcctttgcagcgacatggatggagccagtggccattatccttagcaaacttatatggaaacagaaaaccaaatactgcgtgttctcacttataaatggaagctaaatgatgagaacatatggacacaaagaggggaataacacacactggggcctactggagggtggaacacaagtggagggagaagatcaggaaaaataattattgggtactatgtttagtacctgcgtgagaaaataatctttacaccaaacccccgcaaaatgcagttcacctgtatagcaaacctgcacgtgtacccctgaacctaatttaaaagttataaaataaacgtatcttattttcagtacaatacaccacagagtagaagggttaaaagagattgcttctgaggaggtgagatgggggtaaggacagcacaagagcattttggggggtgatgaagctgttctgtgtcttgcctgcgatgatggctacacgactaagcccttgtcagaactcacagaactttacttcaaaaggagcggattttactacacatcaattccaataacaaatactttgtctttaagcaaagggatacctaaatatagcgtattgaatggatctccagaaaaacacatttttcagttcatgtttcagcctaggcctcatctcatccaggaaaccttgtcttgcttgcctttacatacatgtggcaatcagtagtttcttttagggctcggactgaacactcaatgaacttcaatcttagcgcttgtcgtagcagattgacatggtttatttatatgtgtcattctctgtagtaaaaggaaaggatcaaggccattcacttttgtagtgattgtgcatggcagtatttggcacatagtagattattaattatggaacttctgttttcacacacacacacacacacacacacacacacacttcagagctattttcatttaaatatttgctttagtctccaaagcccctctgcctcaacaccaacccttctatctcattattcatcagcttttctcctattacgaaactacttaggaaagcccacttatttagcttatgatggcaaaaataaatatttgtacttttttttttttttttagtcatcgcttcatagaacagcctctgtcctctgcttatgccatgtctgaatatatgctggaggtaaaaagagttcctggttgagagcttcaatttgagaaactatctgagattactttccaggttccaccgtggaacctgtctgaccttgaacaaatgacctcgaacaagtggctgaaatctcttctatttcgtcaactgtaaaatgggggaaaaccatgtctatctcatggggttcatgtgaaggttaagaaattgcttattcagtgtttagcacagtgcctgatatgcataaagctcctaggaatattagctgttattgtatttccttaaagaagcccatagctctatatgccctttcattatatgttttagtagcccaatttaacatatggataaaatatttttaagttaaatgatttgctaatggattgttgaacgagtggcagacacccatattatagacgaaggtcaagtccataacatacagtacatttccccactttcatttcccattaccaaaattcattattctcctgagaaactcattatagaattcatgtcagattcatctgtgtgttcccagcagtgccttatatccagaaataacactgagtcattgtctagatgtagcagaggtggaatcctccaaagagaagcctcagagtggccaggtttgccaagtatagggatgccttgattactggccttactctttatgctcgtgaattcctaagttttattcctcctgtagtcatagattggcttttaagctacaagctgaagagagagaaaacctcttccacctcgttggaatatgtctcttcaatccatttgagccaatttaggacatgagactgctcttagtctagaaccagtcatcaggagaattccaggtctgattgactcggactagcgggtcaatatcagggcaaaaattccaacgcacaacacgatgtatcagtaaggagaacctcaaaattatttcttaacgtccagatcatgttcctatttttatatatctattttctcacataagtcattaaaatgatgtacctgtgcgggtcctttaatgatactcaaagatcttgaattataggctaataactaacttaataagctgcagaaattaacatttctgctacgtttatgtagcattttcccacatgtacttcagaggcttgagaaaagaccctgaaataatgactgaataacagctttactcacttaatttcaaatttgttaattcttctgggaaataccgtcaacatccattttattatttttctcaattacatgtacgtttctacatcagtggataagttaaggagaagaattccctcatgataattttttcatgctcgaaaattttgaatcaattttttattttacattatactctttcctagtcattagaaagggagtggtggttaagataggcaagaatgctttataaggatactactctcgtttcaattcttaacatcaaaaaccttaacagtgtgtagactataaaataaaatatctagggatcagagcattgtgctgaactttgcaggttttttagtcaataatatatatgacgtgttcacagaattctttgtcaacaaagtacttttggagctccaggccatttaagttggtttttgtactttttctttttcttcggaagactttttttgttctatttacctggaagtgtttcttttttggtactgtgaattaaaatgagaccaatctactaggcaggaaaaaaccttaattagattgttgacacagacaaataagaatgtcaattagcatctactgtcacatgcctctccagactgcttctaggatgagtggcctcaagcagctacatcatctttatactcctaaagcatcaaggaaacttggagtgacaattcatatcatgaacacatccacagtgatgatgattgtgcttcttcccccccacccaacaacaaaggatgaatgccaattaatgtattcagttttttgcgtcaaaggctggatcacttgtgcaatgagggtaatcatcctgaccagacaggccatacaatccatattgtgtgaattaaagataatatgcgtgaaacaccttactctggatgtggttcatagcagtagcaaaaagatgaaaactatggtatgctaacattttagagatctgtactctattttaaataattttataaaagtgcatatacaataaaaagtgcacgtatcacaagtatatgcctcaaaatctaaagccagtcatgtaatcagcatccacttcaagaaagaaaacaaaacagtacccctggttcctctttgcaatcattagtctcccaagagtaatcaccgatctgatctgtgacagcatagattggttttgccctactatatttttgctgaattatacaatatatgctctttaatgtctggcttcttagtgcattgtatttgtgtatcagctattctcttgtgtgtagttattaaacaatcattttatgggctgcataatattccatagggtaaatataacagttttattgataacttagctattacaaatagtgctgttgcagacatatattctattacatgtcttttggtataagaatttacacatttcacatgggtgtatacccagaactgagattgctaaatattggggcacattgtatacattttgatttagtagataagatattgccagatatcgtaaatgcacagtttgataaatatagagatttatactttttctagagaaaagccatcaatatcagtgtatgtgtatatatatacgcgtgtgtatatatacgtatatatatacgcgtgtgtatatatacgtatatatacacacatatatatacgtatatatgtgtatatatatacgtatatatatacacatatatacatatatgtgtgtgtgtatatatatatatgaaacaactcagaagcagaaagataccccatgttctcacttataagtgaaagacaaataatgtataaacatgtacacatggacatagagtgtgtagtgataagcattggagactgaagtgtgggggtgtgcaagggaatcagtgataaattaatggctacaatgtacataatttgggtgatggatacactaaaaatccaaagttcaccactatccaacatactcacataataaaattgcacttgtaccccttacattcatacaaataaaaaattatttaaataaaaataaatatgtgtatatgtatgcatacatacatatgcatatacatatgtgtttgtgtgtgtgtatataacttacacttaaaataagcatggatgctgcaatgaatgctcaatttacaagggttgtccatccaaacttgtggcaagtatctcacctctcaagttgttttcttttttcttcatatatttcttgcttttgtctaggaaggaataatttggcttgcctttcaagagtgtacagtcagcatgataacccaaacacttaagacacgtgctaacccatgtggatcccttgagagaaggaaaacagtggtccttttactgggcagatagagcccggggccaggtttcgtggcttgaagatttcagcttctctgcgcctctcagctcagtgcctctggaagcaatttacaacttgtgaggccatactcaaaggccctgttattaattccccgccttccgagaccccatttcagaggatctcaattgctctcagagtgaatttactgtttcctgaattccgtaatcccaatagcaggtctgttgtcctcattagatagcttaagttagagtcggcagtgtaattggcaactgagctactaagtatccaatgcttatgtggaaaatatgttccctattgcaaacaactgatattcatattcaatttggcaccatcatctatctataaagcagatactacttgtgtttattaagttttatcccaaataattattttagtaataatgcttgaaaataggccttggtcatttgcatgtctgtatatggcatatcctgagtctttgtatgtattagaaagatcactcgttttgacttgatggtttaataaaagatgtccctcactttgggcagagacatttgaaaaaggcactccaaccagggacctaagaggtgaatgagatgcagctctgaatcaggtcacacggcctcaggaaggaaacatcttggttttcacatccctcacttctcgatgtcatgtgcaatacacaaatgacccctcaacacacacacaggcacatacacaaacacacactcactcactcactgtattgtctctttccttgactaagtccttcttactaactcaagctctaaagcttttttacttacctaaggtgagtgtgtgaggatttgaggtttcaatattaaaattcagaaacatttaaagttcattttaaatattagtaaaaaaaaatcttgacaaaatacaattatagacaaaaagaaaattcagaatatttggaatttaaggttgaggttacagccctatttatgaaatattagaagaaaaatgctggagagaataaagcaggtttatgagtctgatagaaagcataaccagatgattatgcatatatttgcatatgcaaagctttctaggcaatctgaacatttaaacctacaaatgtggctgcgatgaacagccacagaagagcaggctagaacagaagaggaggctagaacagaagagcaggcagaagttgtaaatgaaatgttaattttcaatggttgatctcccaagtactggaacagatttgtgctgttttcaaggttttggttcaaagaatccagtagtgtattgaattgttttgtggcacttccctgttattttgctttgtaagctacctcaatccatgaagtggctatgagccccttatacaacactgttgatttttttttccttatctacgcaaaagatttttgattcagggccaggcatggtggctcacgcctgtaatcccagcactttgggaggccgaggcaggcggatcatgaggtcaggagatagagaccatcctggctaacacggtgaaaacccacctctactacaaatacaaaaaatcagccgggcgtagtggcatgtgccggtagtcccagctactcgggaggctgaggcaggagaatcacttgaacccggtagccgagatcctgccactccactccagcctgggcgacagagccagactccatctcaaaaaaagaaaaaaaaaaaagattttttattcaggtggctatcagactcattaaatagaagccttaggttaagttcacgggttgctagttggaagcctccatggactatgttcataaaataatagaaaggagttatgcaggacttcttgaaatgttatttaaaaagtcagaataggctttctattacttgtctgaggtcaaatacatgtagtgctttctgaccatttcatccagggtgttagctaggacaataagaggtgcttaaaaattattagattgagtaaatgagaaagcccttagaaacataggaacagaatgacccttgctttggatctaatattgactcccacgcctaaatccctttggagaactcctttattttctcttccatcaagagcaggtataaattaaaaacaccattaaaggggccatctagctcagctgaagctttcatcacacatgtaggggaggtatggttgggagggatctttttatcctttaggtcttcaatttacataggacttttgaataatcaaatagccccaaagagctgatcttaggactagttgtaattgagactatttctccatggggtagaaaaatctagttgtaggaaaactgagaagtagatgtatgttaacctcaaaggctgttttttacaaaggatgttaaagcatcatctttgctcagaaagggagcaataaaacaaatgagtggaaataacaaaaggaaataatggccaggtgcagtgcctcacactagtaatcccaacactggggggctgtggtgtaaggatcgcttgaggctagcagttcaagaccagcctgagtaaaataggcctcatctctacaaaatagatagatagatagatagatagatagatagatagatagatagatagccgggcgaggtagtgtgcccctgtagccccagctactcaggaggctgagatgggagaatcgtttgagcccatgaggtcaagtctatggtgagctgtgctccctcctgccactgcactccagcctgggtgacagagtgagatcctgtctcgaaaacaaaaggcatactttttagatgtaatggaatagagtacttccaaacctggctgcctgctggagttgtattggaagaggttgcacgacttcagtggagatggcctagatgcctgctcagcagtcatctagttaaagcaactaagaacatgtaatatgaaactgcaaaaagagatcgtgtacgtaaaatcactctgggctcctcagatagagtaataaacacaactcctgacagccaaataaaaagagaaataatacagcccttgacttccttggttgctttgacatactaagtaggtgttacaggttgggttctctgggaaacagactctaaaacatttttatttttactttatttgttgttattattattattattattattttagacagaattttgctctcgttgtccatgttggagtgtaatggcacaatctcgtctcactgtaatttccgccttatgggttcaagtgattcttctgcctcaaactcccaagtatctgggattacaggcaagtactaccacgcctggctaattttgtatttttagtagagacggggtttcatcatgttggtcaggctggtctcaaacacccgacctcaggtgatccacccacttctgcctcccaaagtgctgggattacaggcgtgagccactacgcccggccagactctaaaataaagtttaatatgcagaatacttatcagggaatgcccactggaccaatacatattcaagagagggcttagaagcaggattggacagaaagagaagttgagctgtaatgcaggcccaataacagccttagtgttaagcaggctgagagattcagcagttaatgagacagtcaacccaaacagttttataggcatcaaaagtatgatcagcatggtgtcagtttcctgtgtcacttgtcccacagtatgataccaaaattaaagagaccagatgacatgcaacacaagcagtgtgcactctgttgttgagaagccaatttcgtcatgcaattaagcagttttatactctgcagctgtactttaaggggagctgagatggaacatcatatgtctcaccataaccagaaaggcagatgagaaatgttctatcgccacctcccacaaggtaagggacttccctaaagatacagaggtgggtggaatattgccttggtagacttcctctcaagactgcctatcttcccatgttggaaggatcacagagcatttgtcaagacgtgggtcaatctgcagttgaactttgtgtatgtggcctatgtggatacttataatatcattgggcacctccatagagctgtttcccaattgaccaaacatatgggaagcttcagagcttcgaatgacccttcagagtagtcctgagaacagtgagccttactactcctgcattaatcagtcattggatgatagccttctcagaaataagtcatgaccttgtgcaagggggctcttcatggctgggaccacccctaaaactgagagctgaaggctgtctgccaccagcccttccacctgctgggacaagttctttattgaagggaaatctgagtagttcatcagcgtccatcacagtagtcaagccgttcattcttccttcttatgacaacattgtgcttattgttatgtaatccctttccagaacattttaggttaagttttaaaaataatgcatataaatagacaattcaaatactggggaaaaaaagcttgcacttatattgttatagaaatgtgcacacttaaagagctgatttcttctgggtatttacataactttatttaaaaatccatccatttttaattagctgtttttaatatgcagttagctaagatattataagccatatattaggctaatggacatttaacagcttagttaagttcttttaatggaaatgctgacaaacctttgtctgtaattatagcaacactgtgattacagaaggaggtgcctctccttgttgtttgcagccctaaaattccatgtggctataagtaacaaagtccattattagataaacacaagtcatacttggcattacttgcattactcgtctccttgctttatttgaatcattttttaaagttgtaaaatgtttttcaaaactcagaatagtggccagttaataatatgattcctcttatattatgagattttaaaaaatagttcaccagtttctggtggcctctatacccattggcaagtcctagccattgtgaattaagtaaacaattctttatggaaattttttaatccttaaaccctataagtttttattcatcatgtcaggtcacttgtcaaagggtttaacattcagaattcaacaaaagtttatcaaacacctattacaggacgtgcaattttgggcgcactgggatttcagcaattaacaatcaagatatgatttgtatcgacatggatattacattctctcacaggagacagaaaacaaaataactagaaaatatacataaagagactttaaaatggggtaaaattacagattgtgacaggatgaccactttggttcagaatatctaggacatttttttctttttttttcccctccctccctctttcttttttttctttttctttttctttcttttctttctttttctttctgcctttcggagtcttgctctgttgcccaggctggagcgcagtggtgcaatctcagctcactgcaacctctgcctcccatgttcaagcttttcgtgtgcctccgcctcccaaataactgggactagaggcatgcaccaccaggcccagctgatttttgtatttttagtagagatggggtttgaccatgttgcccaggctggtctcaaacttctgacctcaagcgatccacccgcctcagcctcccaaagtgctgggatttacaggcgtgacccaccaggcccaagcaaggacatttttttctgagccatgttatttaaacagagatctgaatgacaagaaggggccagctctgtgatgtaggggaagaaaaatatgttccttctacccttctaggctgcccagctggagtcctacaaagttagagtgacaaaagacagattaacaagaggaaaagcctagaagtttattaaaatattcagtgcacatacacctggtagaaactcagtgatgagtaactcaaaggggtggttagaatgttgggtttatatagcatctgaacaaagaacagtaaacttgtagagaaatgacaaaacaaagaaaaaaggggtttaggtatttagggttgccaaactgtaggaaggtaaatatatgggagaaacatggagtatagtttgtttatgccaagtctatcttgagatcaacttttcgtattcttcatggccataacaatttcccaggagagagggcttatagcagttatcatttctcagaagtttctgcttttatttagacaagggaagcactgggaaggcttctttttgcttatattgattcttacttgcctctaactaaaagtaatctttatgtcaaagtgccatattttggagtggtatatattgatctcctataataacaatcaaaaggaacagtattctaggcaggagtaccactaatgcatagtgtttggtgtaaagacaagttaacatattcatggggcaacaacaacaataagccaatatggctaagacattgaggatgagtgagttggagaagtaggcaatggccagctcatataaagacttgttcgtttttataaattgtttagattttattgtaattatggtggcaagtgattggagagtattagcttcactttgactggcttatcgaaaacggaatgtagggggtgaaagtggaataaaaagaccagtcattaattgagtagtccgtgtgagagatgatagtggcttggacaaggacgattgtactggagagattgaagcgactgatttcagatttgtagtcaacaaggcttaattggtaggagaaaaaaataaatcagtgttaactctttaatgtttaacttgaataattatgatgagggtattaccatttattgagatgtagaatattataaagtaagagcagatttgttcaaaaagtatcaagaatctttatttggacatgctagtttggggatgcttattagagaccctaggaaactgaatataaatgtggattttagagaagagcttagggctggcagatgcacattaaggatctgtctagagccatggcgctagagacctccaggagaacataaatagtctcaagatcaagccctgagacactcagatgtttagaagtggaacagaagagggacatccaatatagaataccaagaattaggaggggaatcaagagagtgtggcaatatgaaagatacaaaaagagtgttgaagggagggagtaattaataaccagcatgttatgaggggctcagtataatgaaaagataagtgactattggatttggcaacatataattttttggtgatctggacaagagcaatttgaacagaatgatggatatggaaggtccagaggagtaggctgagtaaataatataaggtgggaaaatagatacaaagattatagacaactttttcaagaagttttactgtgaaggggcacagcaagctgagacagtgaggataaataatagactcaaggatggtaactttagaataagaaatttcaatctgatgggatttaagtgttagcaaggaagctttaagaagttattttccccattagaatgatctgaaaaatgttttagaacattcctcttatattctattttatcacatttatataactttcagagaattgaaagaggtattaagttattatgaaattttctgagattaataagataacaattataggatgttttcttttagttgaaatacacctactcagcctaatttttataacttcttactgaagtataatatacttcagtagaaaagcatgcctaatataaaggtgcagctagatgaatttgcacaaactgaacacatccctttaaccagcacttagattaaaaacagaaccttgatgatacctcagaggcccccttctgccccttttcagtctctccgtgctacccccatggataagcattatcgtgatttctaataccatagattaattttgccagtttttgaattttatgcaaatggatctatttcacctaattgtaaatatataacattgtcatagcaaggcactcattgccttacactgaaaattacattgactctttgccacaagcttagacttgctttctcattttattatcatcaagcctatagctttcacactataccttgttcctgctcttccctactctatttcttggtagatattctatatcagtcttagagtgcagtttgcagaacccctccatcagaatctcctagggagcttgttaataatgcagattcctaggcccctcccatggtttatgaatctgagagtgaggcagacaagactataccctctcatgcctctataatgtaataatgtcttcctagaatgttctttgctgcatctcttattaaagaaatcttatgggccgggcagggtggctcacgcctgtaatcccagcactttgggagcctgaggcgggcggatcacatggtcaagagatcgagaccatcctggctaacacggtgaaaccccatctctactaaaaatataaaaaattagccgggcgtgctggcaggcgcctgtagtcccagctactcgggaggctgaggcaggaaaatggtgtgaacccgggaggtggagcttgcagtgagctgagatcacgacactccactccagcctgggtgacagagcgagactctgtctcaaaaaaaaaaaaaagaaagaaagaaaaaaagaagtcttatgtttcctttatggccagagcacaacattgtcatgaagtcatctaaaatttcccactagaggtaacatctccttcccctgtctagctcttttaaagcattacctccatttgccttgtatcatagctgcttgtacacctgtctgtctttccgctgaggttataatcctctggagggtcatgactttgcattcctttgtgtctcccattagcagccagcacagtgccttgcatactgttagttctaaataacttctctctctctctctctctctttttttttttttttttttttttttttttttttttgagacagagtctcgttctgtcacccaggctggagtgcagtgcaatggcatggtcacagctcactgcaacctccccatcgtgggctcaaatgattctcctgcctctgtcttccagtagctgggattataagtgtctgccaccacgcctggctaatttttgtatctttagtggagacggggtttcaccatgttgcccaggctggtctcgaactcctggtctcaagcagtctgccctactcggcctcccaaagtgctgagattacaggcgtcagctgctgcgcgcatccctaaataaacttttttttttttggcatgaaatctgtaacactggaaagatgttattgccttagaataattaagagattaaatgtagaatctcaaaaacattcatttttttccatgaaaactttaccaggcctcaagggataggaaaattatgggtacagaattgagaatctgtaggaacttgcaagataaacaacggtttcacaagaaagaccttgttggagagttaaattttcagacagttgtaataacttcacattaaagttttgtcaaaaaataagtatctgcatgttttgtttgccttccaatgccctcattttatttgattttttcccataagtaactatagtgaaagcacgaaaatgtgtttctgtgtttgtgtgcctgtatgttaattgtgactgtttctattgcattgttattgcagaacctaggcacgcactctgtaggcttgggtgctttctccaactgaaaaaaatcctacatatggataaattatttttacagccagtgtttaattttacaagtggtccccctccttctgtttttaggatggcagagagaatacatatttacttaccattatcacttactcatgctttgagcttgaaggaaatgagacagaaaaatgaagtaacattaacttctctctggaactatgtttctcatattagagctttatctgaggagttcacttcctctctcttcaatgctttgttcctctccagtcgattcaaatgtcctcttaaagcagaagttccgaacctctttctgtgacttcaggagagcatgagaatgtaaatataagttttaggactaaattttcaaagactttttccactcagctctcttttcctcttcggtttgttgttgtcgttgttgttgttgtcgttgttgttgttgctgctgctgctgctgtttttccccttccacttccgtaactgagctcttagggtccatctggaatctgattgcaattaaaaaaaaaaaagtttatttttacctccttgtacgtgctttctcctaaagcaggagtcagaagccttttttctttgaagggctagttagtaaatattttaggcttgtcgtctttgtcgcaattactcaactacgctgttgtagtatgaaagcagacaatacatacctgaatgagcatggttttgttcctagcaaactttacgcacagagaaatttggatatcgtataatttttatgtgttgcaaagttgtattattcttttgatttctccccaaccatttaatatgtaaatcccattcttagcttgtgtgccatacgcacacaggcagcaaatgcgagttgtcacacaggctatagtttctgactttatgtcttaaagtaaacagtaataatcattctctttttccaaacagtccactaatctccctttgtattcagcccttgcatagtaaacgccgtttcttcatcatcctgatttttattctgagaaaatactgtatattgttcccatgcactagggttcggggaaatttaaaaggatgtaggatctccttttcattggtcctaaaattgcactggggaggcaggtcatgtttatgaacagataaatagtatcataatataatcatgcatttctatggctagcatttagaactatagcttttgatgtcatgtggtttttatatggttgattatttttttcttatttataaaatgaaaaagtttgagaatttttcatctccttaatgtattcccttatttgagggaaaagtatttacctactacataggaatttatcttaaaattttctttgtctatctatttttatggaatataatcgagcaactattttactaattaatactttaatatcattatgaaaatgttctcatatttttaaccttataagatcagataattgctatgccaatctatggttgaaatgggttcttatacttaacgctatgctctttcttctgagatgtaaaaatatgtttaaatcagaatttatataggtgtcaattcaaaatgacagtagttcattattttgattagtataaatgttcacaactaattctattctcttatctattaagtcaccaaataaagtatatttgttttaaatatttaacagtttaaattattctttgaaaacttatgagtctaaagtaagaacaattaacccattcattttgcaagtgggatagttgaattttacttgcaatccagggatttttgacagtttgaaatatacatacataccatgtatgtttaggaaaacatttaaaaagagggggttgtaaaataataatagttcttccatgattttttagccataatgtttataatataaaatatgtatactcttgttattgaatgtagtatgtttctaatttaccagaaggcaagagaataatcctggagaatttctcaaggcatcttcgaactctttgatttattgctcacatatagtaatttgccaaatgacgccctagtgaactgaaagaattaatgccccgtcctaagtcactttcaccgagggactgaaaacctgcagcattttgccaattagaggaggaaacaatctaccttgcagagtcaggagtactggataaaggagctaagagtgttgctttttttccccttcttactttaaaaatcccaattcatcccatgtctttcttaaaggctaagtgaagtagtaagtacgtttttgcaacatacgaatttagcagactggccttgtgtttatttttggccggaaccattacacttatttccaaccctctcctttatttgttggttgataatgggctaattttgaatctttactgtcaaaagaacattaagagaagcagccctgcctgcatcgcaggctatgtctgtcctttgccgagtattaaacactaaaaaaaaattaagaaaatactaacaaaatgacaaagcattaagaaaataaaactagatgttaaaggaaatgagaaaataggaaaggatgctgtacctggagtgattttttttccccaggctacctaagatgatcaaaaaagagctaatttctcttaggtttctattaaggaattactagaatatcgggcacaccaggaaactttatcagtggacctgtcctgaaccaaattttcttaatgtatatatgataatttgttaccacatcccagattattttacaggaattaaaatatatttgaaacactgacagggaaaattgggtaagacattgatagatactacaatctgtacttgaaactgcactcaaggaattcgttagtcaagaaagaacacaatgactgtgggcccctctgggttttggaacctcttttgtaaagcatttttttttttcccaaatagaagatattatttttgaaaaggttaaataaaaaatctttgttcactatatagtttcctcctaaggagtaaattaatttatataaaatattgcaatataaataacaattttaaaatctcaaaagagcagtgttttaaaaataatgtagaaacattaagaaatgacttcaaatgataagaatgtcattggagagcaaagggtttttaatattacatatcgtggcacgtatatcagcacccaaccgctcaagatacagagttctttacaaaaatcaaacagaaggaaatgtgccaccttgttcataaactatatttaataataagccaggcagataaagtcactttcacaaataatgagcaagcccatggtaatataattcatttacaataagatttatctcatggaattcttagactgtgctttgaaatttaaataattctgataaatgccaacagaatagagaaatcaattccagagcaattactaacacgttgcattacctttctaacattaatatttctcttcatacatatcattgaagagaaaatgaggatggaaaataaaaagatcaggtaatatatttgctttctcatctagggttgttatgatcttcaagatgaagttttattttttactcctagcaaatgatattcttttttattttagtttttattattttatttttctgtaaattattggggtacaggtggtatttggttacatgagtaagttcttttttttgatatttctgagattttttttttattctactttaagttttagggtacatgtgcacaacgtgcaggtttgttacgtatgtatacatgtgccatgttggtgtgctgcacccattaactcgtcatttagcattaggtatatctcctaatgctatccctcccccctccccccaccccacaacaggccccggtgtgtgatgttccccttcctgtgtccatgtgttctcattgttcaattcccacctatgagcgagaacatgcggtgtttggttttttgtccttgcgatagtttgctgagaaaaccacgaggtaccatctcacgccagttagaatggcgatcattaaaaatcaggaaacaacaggtgctggtgaggatgtggagaaacaggaacacttttacactgttggtgggactgtaaactagttcaaccattgtggaagtcagtgtggcgattcctcaggcatctagaactagaattaccatttgacccagccatcccattactgggtatatacccaaaggattataaatcatgctgctgtaaagacacatgcacatgtatgtttattgcggcactattcacaatagcaaagacttggaaccaacccaaatgtccgacaatgatagactggattaagaaaatgtggcacatatacaccatggaatactgtgcagccataaaaaaggatgagttcacgtcctttgtagggacatggatgaagctggaaaccatcattctcagcaaactattgcaatgagtaagttctttagtggtaatttgtgagatcctggtgcacccatcacacgagtagtatacactgcaccatatatgttatcttttgtccctcggcaccccttttctaccccccaagtctccaaagcccattgtatcattcttatgcctttgcatcctcatagcttagctcccacgtatcagtgagaacatatgctgtttggttttccattcctgagttacttcacttacaatgatagtctccaatcgcatccaggtcattgcaaatgctgttaattcattcctttttatggctgagtagtattcatatatatatatatagacacacgtacatacatatgtatatataccgcagtttctttatctacttgtcgattgatgggcatttgggttgatacttgcacacacatgtttatagcagcataattcacaattgcaagtgatattctcaggaagcatgatgtaagtgacagagacttactttgtagactgcactcattcacttgttctctgaatgtgctctaggcagcctgagtttctactatgtcagtgttacatagatgagaaaccccatgggtggtttccacagaggctgcaatactatttttgataccaaaaatctgtttggttttgtgagccccagatgcccatatggaaaactgaagtgttgatacctctttgtagccctctgatgaactgcatggttcaccttcctcagcagtttgagcggggtggggagagcgcctgcttcctagccatccgattggcctgaatcatcaaaaatgctatcatgaaacaggttctgtttatctgctccagattacacccatcatgttctagagtgctggtttcatgcttgaatctagatcaagcctgctttcctcccctgcctgtactccctgtggctacctacagtcctgctgctgacagataatctaaaccaatagcacctaattagcctatttgctcatgtgttttttccatcgtggtataatgtcctccttgtcaatttagggtgaaaatgtagcaacacgttgctgatggtttaatttctggaatgcaggtaatgaatgtgtttttgcttatccaagtcttcccatcagatgtcaaatatagaagaacagtgttcagaggtcctaaatttaaattggagtgagaaattcacagcgcccctgaactcaggcaaaatgcactctgacaagtcaaccagatattcacagatggtctggaggatttgaagcctaatttggtgaaataaaattaaatgagtgaaattgtatgcagtcattaatctatcaccatacttaaaatgcttcattgaaatttcttttactgcttcaaatgaaaaaagatcaaactatgttatagaaaagcattcaaaacccttacataacatagataaaacttggttggagacttacagaactttctctgctgcttcgagaaagttacagtgcccacaaatctattgctattagaatattttattgtattcaacactcaattctaccataattatgtatatgagaaaaatatttttacctataaaataattattattaccttttaaaaatctgacattcttccttttttctaaagaaacatatttagatttagcttttattttatttttgtgttgatacatagagattgtacatatttctaagattctagtgatattttgatacaagcgtataatgtgtaatgatcaaatcagggtaattgggatatccaccatctgaaacacttatcatttcttcttttcaatgccatcataccaaaaggaagtaaatagaatttcaaatataaggacagccatgattttacatacatgcctacgattccaccacaaaccataattacgtcccccaaacttttaacatttcagatactttgtcccaggtatttcatgataaggattgggctatgactctgttacagaagggccaaatgactaaaatgtctctgaacaatattgattgcaaatattctacccagttgtcaggtcaatatgttccaattcggaatttataacattgtatctctactcccaaaccatccaatctcacctacctcacttccatattatggtgggtgatctcagattatatttaagctcatggttacttgtcaagtagatatggagtttagcctaacttttgaaatttatgctgagattacccttctcattatagaattaagtaggcagtttccaagtttagatttagcaggcagtttttttcaaatcacttaaaagttatatttttttagggcattgaacaggtttgaaatcctaccaagatgtcatgtacacatagaccaatagaacagaatagagaacacataaataaaactgcacagctacagccaactgttcgtcgacaaagtcaacaaaaaaataagcattgggaaatggattaaagatttaaatgtaagacttcaagctataagaatcctagaataaaatctgggaaataccattctggacattggcttgggaaagaatttttgactaagtccttaaaagcaattgcaaaaaaaaaaaaaaaaaaaaaatgacaagcaaggacttactaaaataaagagcttctgcatggcaaaataaatgatcaacagagtaaacagacaaacaccaaatgggagaaaacttttgcaagttatgcatctgacggtggtgtaatatccagaatctatgaggaacctaaacaattgaacaaacaaaaatcataaaacatcatttaaaaaatgggcaaaagacatgaacagacatttctcaaaagaagatatacacgcagccaataaacatgaaaaatgcgtcacatcactcatcatcagagaaatgcaaatcaaaaccgcaaggagataccatctcacacccgtcagactggctttgttaaaaagtcaaaagacacccaatgctggcaaggccgcagagacaaggggatgcttatacactgttgttgggaatgttaattagttcagccactgtagaaagcagtttggacatttctcaaagaacttaaaatagaactatcatttgacccatcaatcccattactgagtagatatccaaaagaaaacaaatggttctaccaaaaagacacatgcactcacatgtttgtcacagcactatgcacaatagcaaagtaatgggatcaacataggtgtccgtcaacgttggattggataaagtaaatgttgtacacatacaccataaaatactatacagccacgaaaagaagaaaatcatatcctttgcagcaacatagatgcagctagaggccattatcctaagcaaattaacataagaacagaaaaccaaatactatatgtactcagttatgagttggagctaaatgttaggtacttatagaattgaagatggcaacagtagaaactagggactaatagaaggggaaaggaaagggggagacaagggttgaaaagctgcctattgtgtactatgcttactacctggttaatgggatcatttgtatcccaaacctcagcatcacgccatatatccaggtaacaaacctgaacatgtaccctctggatcttaaaagttgaaaaaaaaagatgtcatataaatattcgtggtcactaaaagtatctaatgtattatacataaaaataaaaattgggtgaattggaagtgtattctttgtatcaagtcatgtcggagatcctattctgctttgatcacagtgtgaattcttttgcatttttgttaccagtcacttctttatttattgaactaataattacatattctgataatctgtcagaaagataaaaacattctttgtccatgtgtctgaaaatttttaacctatttttctaatgttttaagtgagaagagcatgttaatactgaaattgtaagcagtagactgaaaaatcatcccaatccatgggttatatattgaattgcttttaactgtattactaaatattaagcttaatttattttatttctacatatccccatttccactataggtgatttgtatgaatttaggaacttccttctctcatccatttttatattaaaactcagactttctaaaacaatatttctatccatccatcgttggtaactatgtactgacatgttttgtgcatccgaaaaatgttagcattagtttgtgcgcacagaagtaattccagtcaccatatgatgagctgatttatttatttcgtaagtgtgttcattattattatctcttcagcacccaaatatataggggacttaatgatacctacaagtaaaaacggaagacaaaaacgccctgctctctacagaggttaaaatgtttttgcaacagggctctagatctcagctgtgaaagtagggacgagatgaggctaggcatgcagtgtcagtataatacaatataatcaacatgtcagcatctaatgcaggtgttgcaaaacaaaatgtacacatgggtagtcaggtaacagaaaagcatgaagtagtaagggctatctatgcaagaggttccaagctgactatatactgaaatatttaaacactatgtggggcaaataaaatggacattagaacagttcgatggtcagttggggacttctgctctttcttccagtctctgaacatatcttaaagccacaatcatctatttttatttattgttatacatttatttataagccagcacccctgtgatttaagttctgttgaaatgctgagttggaaaagatcgatggatgggggaaatttagtgcagaggttttgccccaggttcaaaatcctttataaaatattaatacatggaacaaatattgaacaattaaaccactgataagttaatcaatctgattcaaagtacacctgtgaagagggacatggcaagaaaaatattacagtaagaactagaaacattccttcatggctgcttgatatggatatgtcatgtttaagaaaattcttctttagactgttgagattttttttcctgacaaagaagattcactgtcgaggaaagaaagaggtactgtgaaatttgttattgaaaacatgcacatacttttgtcagaatgagttaaagagtgaacaaaatgtgcctattacttacgtgttgtgctgttttaattcaagattaaaatatttaacgtccacagacaagaccacttttatatgaatattatttttctgctttattgctcaattttattaccatttcaaaacacccgtgttgctttctatggccaaagatgtttagcacttttcatggttatacttctgtacagtccaaaatacaacacttactttacacatacacaaacatccaatgtattttgttttctgtcaagtaaagacaatgtctgtgttattaagttaaatgtcactttcaaatacaggatatgttgatattagaatgttcaactttatttcctcatttaagcaaattacagtgtgaagaatgtaactgcagcaatttataaaaatcatatcacattcaattatgagagcaaacttgttttgtagacttgaactagtttcaattaatcttggagttatcatttcaaaaattctaaacagagagaaatacggagtgtaataatggtaggtctttgggtaagctgcttccaggaaaagaaagcaattatatatgttcacatagcactgacaaggagaaacaaaactttggacggcaaagaacttgcattagtctttttgacatgttcctgtggtgtgatttattacgtagacaatcagctcaacttctcaagtttgatatccttggaatcatttgaaatttaaattttaatgaaaattcattaattccaaggccaaaagaagtgattctaattgcttttgagaatcagactatgaaagaattctttggcaaacttgcactgtcttttctcttttatcattggttgcttcgtaggtacttaattgaaggtcctctgattatcagcacgggctgacatcagttcactccatgcattttaaacagtaggccagatgtttaaaggatcagctgaagcatcgatagcatgctagggtgaataataaaattttcattatctacaagaagcaaataaaaagcataagcattttcccccattatcctgaaggagaagatgaatgcctaagcaacattttaagaatgggttgagtgtggcctgtgggaaaatttgggtagaaaacttgtagttagctaatgtatatactgtttgcctctttagctcaccatatacccacacacatgggcatgcatgcatacagacagacacatacaatacacacaacaaacaggaaattcagatatactgaagaaatgtatttaagggattactaagtttttgtaaataaaatcctttaagatgctgagaaacaatggaagagaagtaggacatgatggctcatactttcgtaatttacttgtttaacgtttgccaaggtttaaattaatgtagatgtttttgtggctaggattaatgatctaacagtttggaataattaggcacttttatcacctagaaagcccagaaacccagcatgcaaaaattctggtatgtctgcattttacacttagatataacagagaaatgacaagtagtcaagtggatagagaaacgaatgattcttcacacatgcacacacacatagaaattgtctttttaatagtattttaatgtaacacatttatgcataatttctccatagtgtttatcttatagtgaatatgtgatgaatagtctctaacattagtggttttatagattaaacataattaaggctttatatattaaagagtcaattggtgacattctaatataaacatgtttatctcatatacattgaaatattagataattcattcgttgagaataaatcgaatgagtcaaaacttttaacctccactttgagctttgtaatagtatccactgaaaatattcatgaaaatttttaagtcatttctatttatatattcagtccaaacatctcacaagtttaaaatgtaaactcaagaatataatttctgtattctacaattggaagcatccatcatatcagatgaacttatatagtttgtgaaattttgcaaactttctgtttagtaaatcttaatgtcaaacattttaacttccaggttgtctttcttttcagttttaatatccgcgatctttgtatactcgttgaatggattctcaataagtaacccacaaatatatatacatactatgtacctacaaaaaataataaaaagtaaagaaatcgacacttatccatacctgtcccatagtaataaactattcataagtatatttgaaagatatgagaatcataaaagttcgtgtttgcacccttttgtgcgtggaatcctaggtttgcattttgtggatctagactttttggagtgtggaaataaatgaaacaaataatcgagacccagtcttatattcaggttatcattttactacataaagcataaataacatttgcagtttgtttctatggctagctctaaagtcttagcaacgagaacattatagaaagacttcaactgtagcttccagcagaacttctgaggttccgtttatggactaagcagcagttgagggggacaaaactcataggcaattgatcactccaaaggatagattgtcttttctaacctaatcaaaagatttatagtgaaggcatattcagattttgttgaaggatatggatatataatcatgtgtgtgtgtgtgtgtgtgtgtgtgttagacatacttaaaacattatttgagtagaaaattctgcacaaatggaaaagtataacatgtgttatatccacacatgttgagcatttacctggctgaaacatcaaaagctgaattgacttaattgaatgttgaatacttaatagttactttgtagtgactcactattaaaacattatctcaagctttgtcagaattaatttttttaaaaaactcagattagtgtcaggtttactgaaacagcagatctgaaattactgtgtttttttttcctttcaataatcagtttctaatccaaaattgaatatcagttccaactctacattcagtttctgttttacttgtttggactggcttttggttctgttttccacatagatcctctctgtgtaagacaaagccatttgtgcagattaaattttactgagcgtgttaacctatttaaaacattcatccaaaaagactagtatgaattcttcatatggcaagctgcttgttttaaaacttccatttattctaaaatcctttttacttatactttttaagaaacgtattcccgatatacaaaagtaacacatgctcattaaaacaaattaaaaatagtattgtataaagagctgatacatttctgccttgccccatttaactttcttaagtgttcatgtgaatcatccattcacatcaagacatttatctgtattcatatgaacgtgttttaatatatataacatatatagaattttatataaactttccttttaaaatagaaatgaaattatatgatatatttattctgtgtctagctcttgtcacgtaattattcaagaacatatttctaggttaatatctgtattcttaggtagcattcactaactcctcatctacttgttttcttccattctaattgtgtttaacatttcttcatacaattggttgtcatttggtcttctttcatggagggtgcataatgttcattctcaccaattctttacactttacataactgcttgatacgaagccagaccttataaatatcaacaaagcaggaacactgtaatcagctatcagtttcagttgagctgaatgaccctgaatatgtgtacacatattttccaggagattttaaaactgacacctcagatttctaagacctggagaaatcagcatgagaaacattgatctatattattccgtgaaatgatttcactaaatagtgaagcatctcccacatgtggactctgtaatttattagaataaagagttcatgtgcttctgaagaacttgaactactcttctggcctccgtacattggtttcttagctataggaaggctgagcatgtttttcctatgcgtttcctttctagctcatcattttagtgacaaaacaatctttcgtggtgttgctctagctatagaattgtttcagattcatttgaccaaaggtggcaaatacaacagtcccaacaaaaacaaaagacctattacagaatgatggaaatgaccccagggaacaatggcacctccacatttcttaattccaaggttataagcagtggtgtggacaattctcaattccaatgctgaatcgccttctaatttcaaatacctgtgctaaaaattatttacgtctactgaaataatgaactggaccccaccaggaatggccgatatgcttgtagtcagagcacaactgtagaaagaaaataacattttaatttatagaggtatgatgatagctgtttcatactgttttcagaacgatgaatggcctgctcagtagtttcttgtcatcgtactgagacactttaatttcttaccagctgagatgaggaatacgagcccagtgtgcaggtgaaattggttaacaggagccattaaaatttggaagagtcagaatagcatcaatcaaaatgctttcagtgtaggaagtaaacatgtactagcctgacccacctgtcttttcttttaggtatgttggtaatattacaatcattttgaggtatccataaacaactgcttagatctgaagaattgtatatctttctttactctgccctggcctggggttatggttctcattgagctctaacctttcagaaaaaaaatgtagagaagtggttcaagaagaatgctttatcttgcttcataaaaatgatagtgatagttttattgaaggcttactatgtgccaggccaaagtgcgttttattatcgttcccattttccaggcaaagaagctggagcacagagaggctaagtgagttgtccaggatggctcagctaacatgctgcagttgggatttgcacccagaccaacttcttttcaaccactgtcccatcctgtgtcttctctactcaaaaagtgtttcagctccaaacctgaaactttaaagaaaaggaaatccttagtggaaagactaggttttagtcacaaattatctccttccttacattatttgtctctttttcaaatactccaagctttgattaaaactgtctatcactaggaacattgtagaattgctaaggtggaattgttaaaagaactcaattccaattaactttgccattgattactgtgtgttctggaggggtgttctttctttcaggttaatgatgctttattgtatatctcaaagattaaaaataacaatgaaggaagtagcaaaccggaacttctctcacaatgcatctttcaatctcgtgctttaaatgaagataaaatcatggctgtggtaaggttgcaggaaggatgatatagattaagtttcttgcaaactgccctctgaattttcaatagctgtagaaggtattggttttccaaaaaattgacaaattgaggattcattcagcagtttttttctaggtctcttaccagaaagtgatcactaaaaagtgtagggaaaccactcaaagttggatagatcattattttcacttaagcattttaatttcttgaaggagctttataatgcaacaaagaatttacagtcctgtgtcaccgcttaaattttctagggtcatcagtaaactcagtggaaataaattagttcatgaatataattgacccttaaattctgtcactgtgcaagtaatcggtgggtctgctggatatggctttcgagcagacaggtcaacttcttcaaacagagaagaagcatagcataaattgaagacaaataacaaactacttgtttcctccttctttggcatcaccctatggatggagtatgcatttataatttaacacaatcaagagatctttattatcctacttttgggtacaactgcttcgtttctcttttgaatctctacagctatttaaaaatctgttttgtaaaattctttaaaaaactaaaacatcagattcatatttcaggtatcttactatcttataccaacttaagcatccagtattatcacccacccttcccctgagtgaatccttagcactgggctcttcctgttttatccctgtgcatgctgagctctttctggccttcaagtctacttccgttgcaactgttgtctgaatggtctctctatgtccttcttactctctaaatatttcggaatttaaagcctggaataatctaccttagtccaaaagatatgctacactattctagttcacaatgatctcacactgccgttgatacacaacatttaatatcaacttaatatctatttcagttcattacgaggtcacttatgctacatcttatattgttgccttggacttttattatctcttcatatatgtgtttatggtgctcccaccctcacgagaagttgcaaataccatgttagctgtctgatggctttctatgttgtcaggtataccatttcccaaccagttggcattcaatgattaagttcattaacaaagaattgtatgtgttgaaaaagatgtttttttcttaatgaagcacttgtttttatttttttaatgaaatccaccctcttaataaattttaagtgcacaatacagtattgttaaatataagcaaaatgttgcatagcagatctttataatttttttaaccctacatgcctgatagtctatacccattgcacagcatctcaccatttcttccctcctccagcccttagcaaccaccattgtactttctgtttctataattttgactactttagatacctcatgtaagtggatgcgtgcagtatttgtccttttacgacttgcttattttatttagcaaaatggctacaagattcatccacattgtagcatatggtaagatttcctttttgtggcagaatgatattccattgtatgtatataacatagctttatacattcccctgtcaatagacatttagtttgttcacacctcttggctactgtaaaaatgctacaataaacatgggaatgcagatatctcttcaagatcctaaattgaattcgtttagataaatatccagatgcgggattgctagatcttatggtagttatattttttatttttttgaggaaactccatattgttttccacaaaagctgcacaattttatatttccaccagcagtctacatctccaattttcctacaccttcaccaacacatgtaatgatcttgggctttttttttttttttttttaataatggttatcctaatccgtgaggtagtatatcattgtggatttgatttgcatttccctggtagttagtgatgttgaacatcttttcatataactgttggtcattttaatgtcttctttggagaaatatctattcaattcctttgttcactttaaaaattgggttgttcgaatttttgttgttgttgttattacgttcctcatgtattttagatattgacaccttatcagatatatggtttgcaaaccttttctctcattctataggttgcttttaattctgttgattgtttcccttgctttgtagaagctttttagtttgatatatttctgcttatctagttttgtttttgttggctgtccttttagcgtcatatccaaaaaaaattattgtgaagaccaatgtcaggaaatttttcccttatgttttcttctatgagtttcatagtttcagatcttatttttaagtctttactccatttcattttgagttgatttttatgtatagtttaagttaaaggtccaattccattctttgcaatgtgtatatccagttttcccagcaccattggttgaagaggatatcctttcccagttgtgtattcttggcacccctattgaaggtgatgctaggtttatttctgggatctctattctgttccattggtctatatgtctgcctttatgacactatcgtgcgctcttgactgaggtagctttggtaattcattttgaaactagcaagtgtgatgcctccagtttattcttcttcctcaagactgttttggctatttggagtcgtttgtggtttcatatgaattttaggaaatttaccttatttctgtaaaaaatgcgattgggattatgataggaattacactgtatctgtagatggtttggatatatagacttttaaatgacacatcagatgtatttccatttatttttgtcatcttcaatttctttcaacaatatttcatagctttcagcacacacatcttttaccttcttggttgggtatttactaagttatttattctttttattgctattgtaaatgagattgttttctaaatttcctgtttttatgttgctagcgtatagaaacgcaactgttgaatgatgactttgtatcctgcaactttgctgaatttgtttattggttctaaccatgtctctgtgtggcgtcactcttaagattttctacgtatcagatcatctaatttgcaaacagatataattttacatcttcctttccaaatttgatgtattttatttctctttcttatctaattgttctggctagtacttctggtacgattttgaaaagaagtggcaaaagtgtgcattcttgtcttgtttctgatcttaagggaaaagattttcagtcttttgccattaaatgtgatattcactgtgggtttttcatatacggtttttattatgttgcggtaatttcgttctattcctagtttgttgtgtgtttttatcatgaaagtgttgaaacttgttaagcgctttttctgcagctattgagatgaccatagatttttagcctttgttctgttaatgttgtgtatcacactgattagttttcataaattgaaccatttttgcattccaagaataaatcctatatggctctcgtgtataatcctttcaatatactgttgagttcagtttgctagtattttaatgagttattttgcttctatatttatcagcggtattgttctgtacttttctcctagtgtcttttattgactttgatatcaggatactgatgccccttgtagaatgagcttggaagtgttctcttctctttaatttttctgaagaatttgagaaggattggtgttaattcttctttaactgttcattagatttcaccagtgatgacatttggtcctgggcttttctttgttggaaggttttggactactgattcaatctccttactagtttcggcctactcagattttctatttcttcaagattcaatattggtagattgcatgtttcaaggaatttgttcatttttttctaggttaacatacagttgtttacagcagtgtcttataatcatttgcattctttttggataccagttgtaatgtctcctctttcatttctgattttacttatttgaattttcctttttttttttttttttttacttaatctacctaaagatttgtcaattttattgatttgtttttaaaaaaactcttagctttgttgatttttctattgttttctatttcaattttggcttttttctgatctaatcttaatatttccttccctctgctaactttgggcttagtttgtccttctttttctaagtctttgaggaagaaaatggcaaggacatgactttctttagcagttggaaggacaatgctgtaaatactcaaaaattaattatttttatagtgacaaaaacaaaataaaaaacacttcaaagcaaatgaaagtttatcatttaatttatcaaatcactaagcagactgcttgatcagagagaagatactcatatgatcacataaaactgaaagattaagaggtaaggacattcatgttatcattacatctaactttcttatttccaagatggagaaactgagggttggagaaaaagaaagatttctttgttagatacaaacagacaggactaaactcagtatagcagcctcctaaattccaaagtatcatgatactgtgattttatgcattcttcagaaaaatagtagagccactggattctggcaaagaagttatataaaatgtcaagttcttcctttgcctcagaaatgaagttttatgttccaaaattgattgggaagttctccttatacctcacatcacgtctactattttacattgtttacttttgaagaatttttttaattgacaaataataattgtacatattcatggagaacctagtgatgtttttatatatgtaatgtatagtgatcagatcagggtaattagcatatccattatctcaaacattggtcatttatttgtgttgggaacattcaacgttctccttctagccatttgaaacttctatattattgctaactatagtcaccattcagtcgtatagagcactagaacttatttctcctatctagctataatttatttttaaatatgctttttgaatctgttactataaattgaatgtcacatcgttttgaaaatattcttaatttatgctcaacaggcaagattacacacctgtgataatatctttaatttaaaacattactctgtttaatttaccagaatatggaaccctagtcattttagaggtggagcaaatttcagtgataatctagtgcaaatttctcatcttatgaatgaggagattgagtctgatataagggacgagattttcgtcaatgagcagcttgttaacattagctctgtgatagaacacaggcacttgtcctcccaggccggtgtttcttctactctatgatgggctgttttgttgtagtttttaaacagcagcattttcaccatgcatagttttcttccaaagttcgttcttaacgtttttgcacagaataactagattttggaagtagaaaaaggaaattctctttgcatccttgtatctctggttattttctttgtcctttgatctctctctcctcccctcccctcccctcccctccccttcccttccctcccctctccttcccttcccttcccttccctcccctctctcacacattagagaaagagttaaggtattaaagaatacataatactattaaatttccttcacatagagaaaggaatgaaaaaaagtgaaaaatggtcctcaccaaatgtccaaacttctgtaggtcatttccatagtatcagcaatgtcctgtatggtgcctcggggatatgtaagcaaatgagcaagtggttagctaattctagctttggcaaacacttgttatggcttacttgaggagaagtcacttctccaaagtgaaaataatgtgcacaggtcaattagaatttttttgtagaaaaggaaaatactttgtagggacatggatgaatctggaaaccatcgttctcagcaaactattgcaaggacaaaaaaccaaacaccgcatgttctcactcataggtgggaattgaacaatgagaacacatggacacaggaaggggaacatcacacaccggggcctgttgtggggtggggggagggtggagggatagcattaggagatatacttaatgctaaatgaccagttaatgggtgcaggacaccaacatggcacatgtatacatatgtaacaaacctgcacgttgtgcacatgtaccctaaaacttaaagtataataaaaaaaaaaaagaagaaaatacctccttatgctcctgacttattttctttttggttcctcagtcctcttctctctctctctctctctctctctctctctctctctctctctctctcacacacacacacacacataccccacatatacaatatgattaaggatatatgtgaataatgaaagcttcttgtgtatagatttagaagtctaatggacaaaatcaatattttcctatgtgcatttaattcccccctttgatttaggtatatagtctttttttaaaaaagagaaaaaaaattaggtgaccttaaggtatagatcctactttcaaaaggtttacagaactagggagaggaacatggacaagatttaaagaactattttaagcagaataaaatgtgatttatgaacaaagcatatattatttgtgcgtatgtgtgtgtgccaacaaagatgcaattaggagattgcacagggagatgtcattagaaccaaccttaacgggtgagaagtctttgaagacatttagaacatggaagatctctgacagagggaacaaaggcatagtgacaaaagtcaagggcatatttaggactggagagtggtatgtgtggcttgagagtgggcgagaaaaaacaacaatgcctctgtaataggaaagtagacagaggcatgacattaagagctttgccagctgtgctaaaagtagtgaacaagagctaacaaagtgaagaaatgtaccttttctgatgtgtatcattcccttattcatatacttcttgagggggaaattcattctgtgttgatctagtaaactactacaggaccaaatgataaaaagaagtataggaaagaatgtttcagcatactttacgagataacttccttgtagctattctccatagtattttgagcatcacaaagcaatgagctgaaactgtctaagccaaaattgacttgtcatctgttagggatgcttagatgagaattctacatttgagagcttcttagattcattgaccactatgtcccattctaagatccatgaatgcgtgacctaactattacaccttcttttagtctgattgtcaattttgtattttcaattgtgcaagtttctaaaactattttaggaagataaatctagcagtggtgtgggaatagacaagagagaaggggaaagactcttcaggaaactaaactcacaatttatgagtattctttattgcccaagtcttcccaaagtctttcatcaagaaagaggcattgcaactctccttttatagtttgtttttattctggagcagtgatgttttggtggagttgttcctcagtgcgtaattaaagggcctatgacaattacagttcatctcctgctgctcaaggtactgcagatatttggatctactactctcattcatttccaattaatgtcagctttagatttccttcagtatgctatgttataaaatttgattatcgttgtgcccaccttcccacttaatttcaagcaggtttctcgattacctgactaaactaatgaaatctgactaacccaatatctgtggacagtagtgtgatgttactgatttttgtatgattagtcaagtcatattcatgccacgttttcatatagtaccataaaggatattcttctcgtggtccttttcttttattctgaacatacaatgagaagaccggtaaagtgggctaggaaattaaagaaaaatacaaatggcaaaaaatatgggtcactcgaagtctagaatagagagcacaatcaattttgaattaaggggtgataaggtgatttggtcaggtgactggtgaaacaggaaagaaactatactttttgaagtgtttcatccatgtgttaagattcatttggggtcaagaatctaaatttcatatccctgggagtggaaactaagtaaaaaaaaaaattatggaccttggtttaatagctagaggagcaagagtgtatctttatgtgacttaacttctatgtgaaaagtgaaccttaagattaattattgggggaatttacttactcaggttctatgcctagatggtctgcccaactaagaaaacttattttcctgttactccatcctatttttcatacttttatactgcacttgcagaaaagcatatatttctacccaatacgaaaattcctgggaacatatttttctacatttcccaaattacttcaaaaagtaaacttaggttatttcatgatctccattacaatggacaggtggccttattgaatgttgtcctgtgaatacaaagatccagagtttaaagaacaaggtgtacttgcatctcccacttagggtttgcttgtggtggagagagaatctagtttgcttaaaaggatgacagtgcagtgccccaaaatatctgatatcattaaaagtctcatatttgtctttcgtaacttctctagggctgtcgatgacaggagacccttaactcctatgccttgattatgtgaataagcacatgaaaatattttagttatcttagttcacttttaaactaagtttcaattatcactagattctaaatatcatcattgagccgttcttaaggaactgattttctacatattcattcacttcacctatatctagtgtgtctactatttgccaagaaaaatttactctcttaattcagcattccatatacttaacatcataaaaagtaggccatttttagttttctaaattatttatttaaacatttctttaaaattacattctatcattacactatatttcaacactacagtaagcagcctattttgtgatttttccttatataaaatacataattgaaattaaaaatgaagttaccaagagccattttcactctggggaatgcacatttataaattatggggttattttttcttcatcagctttcatattattaaactttgtctcttcataattacagagatgactagacacagaagggaatttaacatttggtgtgcatttgtctaacctatactttatgttagaaaatacatttccatttgaaaaaaaatcagtaattgtgggtgtgatcaagagggcagcctgaaagtcgggtgatgtgactcacacctgtaatcccagcatttttggaggccaaggtgggattatcgattgagcccaggagttcaaaaccagcctgggcaacacagtgagagcctgtctctattagggggaaaaaaaaaaaaagaggaagttagcctgaggcaatgtaaatgaaatacatatttcaaggatatttatacatgattcacgttattcatataaagatgtgccagagaagactataggtacgttattttacactattttgctaggattttaagaaattcaatgtgtttttatttcagttaacttagaaaacttacctaacttatacttctcatggacacaaaagtttttaaagataggatcaaaaagcccacatggtgaagcattttgaactggatgaaaaacatctattatctttaaaattttatgatattactgattgtaatagactccctttttaagaaatcattccttatagaacataaggtttacatttacaatcaacaatttctatccttactacaataaaggcacatataaaaagtacagttgcatatttagcaggtttaattgtacattttaatgtagaaatcaattcaattctttcatttatcagcattattacagtgatttcaaattaagcataggtaactttgatatagataaatgatgtacacagcagttaaattttattttcaattatgtagtaattgtataacctaggcagtataatttgtaaactttgtattttattattatgcttctcccacttggcataagcacaacacttcctaaaagcataattttctatagacttaataactccctaaaaacctgttttggacccctatactatttgatataggcagaaaaaaaacataatccatgctcaaatttgaaaaatgactggtcacatttggtataatactaaaggtaaataaaatcaagagtctatgaacatttccggacctgcacatttgttttattaaaatgcataattgtctttagtgtgtttctatttgtttatactctactgattttaattaaaaataccaaaatacgtttattaaaaaactgtcagaatctaagttgttaaatatacttaactaggaaagtaactgtttaaacgagataatttatagagaaatgtggtgtattgccaattagatgtcaagatacaatacaactgataatgaaaaagtagcattttcttagggatggaatacagtgtaaggaacaccccagtaagaatacaaaaattactgaaaaaaaatcttccttcctgaaaaaccaagtgcccttcaagtgcagaacctcatccaactaattgttaggtatcactaaagcctgataccttcaattttctggatcattcaagctgtatttttgagtccttatactagaggaggtaaagagctataaaaacacttaatggtatctgatgtgaactgtggatcactttgacccatcacttctacgtctacatcttggataaattcccattgttgtcatagattgtacaggtttaatggtgcgtttgtggagggggctcgcttatagaaaatggagactctgaagggataaggaataaatgtatcacttcaggtcttttatttgaaattggggtccagagagcctttttgtatcagacttgtcaaaccatttccatttagtaattatatatgcactagcacttattcctacttacctcacctctttatgcccatttccttgtagttgcggttatgcatgaataatttattgcaccccttaccaacaatggaataaaacttccattctgaaagctttccatactcatttccaatagcaatagggtttttttaacggacgtattacaaatgtacgagtcagttgaacatagtattcctctttgtaagaactccaagtggatgcatgctgttgtctcaaatctcaattagaccttgctttgaggtcccttcattgccagtcatctgttctccttcccctgacttgagtatttctccagatatagataatacattttcccaactctgtgttccaagaactgacagtggctttcattcattttgtttgtttgtttgtttcttctcgttctcaagtatcccgcagtctactgtttcttccctccattcgtttgtcctttcagagtttcaaaatccagcataggtacttcttctaaaatgtcttacccttcacatacacacaccacttgagaccccatcagcctctgtccacacagtttggttacattcatagactatttttatacatcaaaatatttgaaaattttagggtaaatctcagtagtcattcatttttgctcttattcaaccaatactagtcaatcagcctgtgccaggttttgttgcaggtaccaggtatccatccataaagaaaacaacgtccctttgttgtggaatttacattttagcaggggaggcaaagaacccaataaatatgataaaatatcagattaaaagtacgatgaaaaaaatcatcagggtaaaggaaaaagggaagcagtattttagcaagagtggtgaagagaggaggctgagagtgtgacatctgagcagagacctaaatcaagtcaaggaatgaaacatgctactatctaaagaaatgagtcaggataaggaactagtaagagccgaggcccagagatgtgaatatgctgttccaggaacagcaaagagactggttgatatgatgtgaaaaatgagaagaaaccttatgatatgtgtcaagagaaaaaaaaaatttaaaagcatgcttgggaacggaggcctccagatgaaaaaaaaaaacacagttcaaatccttgttcatgcatttagtttgctttgcaatcttgggcaaaatgttaaatttctgtacgttttatcttcctcatttttaaaataggcacaaggacatctacttaataggttcattgtgaggagtaaatgagatgatatatctaggatgcctggcattatatcatacacttaataatacactgaataaataatagttatgtctatttatttccttatcgtttttattattatttcaatgcacagacctgttcataagataatgataaatattagtggcagaaactgaagatgttataaattattaggaggcgggaccactcagttcaatgtatctgttttaatatagtcagcaaaagtgtgaagataccaacaattaaatttcaatgcattcttccatttcactagttttataaactgatgaactaccagaatgtcaatgtatgaattgcatactcattcttaacaaacagatttgcaaaattatgtgtaaaattagccctcagccttccaatttgttattgtcatatttcatggaaatacataatctgtaaatttttgttttaatgatatgtgaaactgcctaaagtagagtcttggcaactacttcacatttgtcctccagagatagtggataaaagtgtcaataaatgaacactctatattcactaatcacaggcaagggacaaggaacagagtggtcacaaaataccacaaaattaaagcacattccaaattaaatatatatgtttttattacagataatgtttgctagactctttctaattatctgcaaagattttaggaatgttttaatgttttaatatttacacacctgtgtatttcaagttcagtcaaacactattgttaaaactaaatcttctcatctctaataataagatgtgaacttatcttggaaggtggttattaggatgggagagataatgtatttcattcaaagtaaaaatatttctctgtttctatctttctctttctctgtcatctatttatcatctatatccaggtatctatgcacctatgtagactagcattcaatgaaccatagatattattagtagtagaattgttactaatattaaaataagaagtatttaagaagaaacatgtcctaaagcataaggtcaattattactctcatgttttttggcatatgaagcctaaaaagtgtcaatttcaagagagtattaataaagattgtgataactgaaaggttcctgcttgaaattttgtgtggtcttacaaatatataaactctaagcatttcagtgagccaattactgactaggcactatgtcttatgactcttttgtcatagtatgtaaaaaacaaagagtagagacatcataaaaattatagtagatgggcactagggaattacgcaaaataatttgtagatttaatgtgaaaccaaaacatctgttcaagtcaatttcccacaggtcatgtggcaaagagtatgagttccagactgaggagaggaaaaggttgttcttccacagggaaataaactgagtgtaataaacataatttttcttcttaagcattatttaaaacaaaaaaaatgccattaaatctatctttcctgcctctcttatcaatgctcccttccctttcaccacttgtttcaaactccaagccttgggattttattttggctttttgccttaatgtaactaaaatgagagcatcacaaatatgaagctcatcaaataatttagcagcattttcccctgtttttaactttctctttggaaacgtagatttcgaaatttaagggcccaaaatatgaaatgcaattataataggccatttgttcattcagcttgataaacttgaataaatagtattgaacttttaatgcaaaaagaacaaaacaaaatagaactctccacgaagaaacttttcaatgtttgcatttctgtgtgaggagaagggtaatgaatgtgggaaccttaatggaatccatgttcttccagtgatgacaagggtcaaaatggagaaaaatggtcactttctacccagtacattatattagttctatgtggacaactataacatagctgatgctggttttcaggccataaatgtaggtatgtattttcctactatttataaggcaaaatttctatttgtttaatgatttctatataggtagattattctgtctttaggattaaaaacgacctgtagaccaagagactttctaatgtccaccttagagtatatggcttttactgttacagtttccatttcctttgcttgcccctttgagagaaggaaaggagacatttgggatacatacatcaatgaggagctattaatgaataaatgaatgaaattgtcagtcaatttatccacatgatcatcaattgccaataattttatcacctctgtgggattaagtagaggtaacagtttagaaatttgattttttgaaagcatttaaaatgttcaaatatatcactctggtaactaagggaaagtgtattattttcttatgcttagtcttattttggttttgcctttttaatttaaattgaacacttatatcaaagagcttgcaggattataatttgaatttttgaagcaaagatcattttcttaacatcaaacaaagagtagatacaataggaataaaatcggcagaaaaacaagagtatcaaggacagacggggagggtgggtctgtgttagcatgtattgctatgaagaaatagccgagactgggtaatgtatttttaaaaagagctttaatcgattcatgattctgcaggttgtacaggaagcaggacaccagcatctactcagcttctggggaggcctccgggagcttttactcatagtggaagatgaaacaggagtaagcatgtcacatggccagagcagaagccagggggaggttgccacacatttaaaaaaaaaaaaaacaaaacagatcgctcaagaactcagctgctatcatgaggacagcatcaagctgtgagggatccacctccgtgactcaaacatctcacaccaggccccaagtccaacacttggcattatatttcaacaagaaaaaaagtttaattggctgatggttctgcaggctgtacaggaagtgtggcacaggcatttgcttggctcctggggaggcctcagggagtttttgctcatggcagaaggtgatgcccacacactttaaaaaaaaaccagatctcatgaaaactcactcactacactgaggacaatacaaaaccatgagggatctgtccccatgacccaaaaacctcccgccaggccccaccaccaacattgggaattatatttccacttgagatttgagtggcggcaaatatccaaactatatcagggctcatgtccagttatatgtcaacatgcctgcattcgaaacatcctgtccaaatcactgccttgtcataatacttatatttttctttattgaatacgaacacaagaagattaaataatagcatttctactttaaaacagtgggcaccatattaacattggaataatagtagtaataacgatagtaataacaatgatataggctgggtgcggaggctcacgcctgtaatcccagcactttgggaggccaaggcgggcggatcatgatgtcaggagatcgagaccatcctggctaacacagtgaaaccccgtctctactaaaaatacaaaaaaattagctgggcatggtggcaggcacctgtagtctcagctacttgggaggctgaggcaggagaatggcgtgaacctgggatgcagagcttgcagtgagccgagatcgtgccactgcactccaacctgggcgacagagcgagacttcatctcaaaaaaaaaattaaataaataaataaataaataataacgataaaaggatatgtgtaggttttttttttaataggctgttaacattaataggcattgtgatttcagggatatcatcaaacatcctggtcctaagacatcccctattgaataggaagggcttaagttaaacttctcatgagccacaattttctgattatatgtttggtgtgtgtaatagccacctcagtgatgatttgattagcctggacccttacataatcattgaagtatacccatgttcctttatatacttctttagtgttgaaagctcaaaattaagcaaaatagtccccttgataatgtttagattcttaacatttgctttctaaagctggcaaatactctcttcccagtgtcatgaagttaaataacatgttgcttagtgaggactttaatgttgccatgccataggaagaccttattcgaaatccccttacctgggagaatgtcagattattaccccccaacttgtttaacacttttaggattttaaaggtgttcacatttgtattagaacaaaatactattgagaaacatttctagaaaaaaattatctttccaaattaaaatcagtggtatgtaatgtaggagtctgattataatgattaaaatacatgggctttgggcatactgcctaggtgaaactcctggtttattgcatcactattagtataacctatgggagttaacctacgtaagcctcagttaatttttctctcaaattgatctaataatcgtctctcataggcttgttttgatagatatttcagtgtatataatatacttaggacagtgcctgatatcagtaagtctccttatatgctatttttctttctattttaattatttatgcaagagaaactattatgctttaactcaattaaaataaaatgcctttgtatttattcatgtcaaaggaaatatgcaagtattgcattcacttcctaggtgcctttttgaattgagctttgcatggttagtttgtataaaaggttcagtgaactttctcataatgattttttattgaacatatggaatccattaagtgttagcaaaagtcactatccactgagctgtgtccaggggctgacagttatgtctatctcttgcaaaaataaacacatacataaatgcactaagacgtatattacctgtcgtcatctcttagagcatttccatttttcttttaagttttttctttcaatgggttttttatctttgtgagtacatggtaggtgtatatgtcaacggggtacatgaggaaggtgtatatattgatggggtacaagagaggttttaacacaagcattcaatatgaaatagtcacatcatggagaatgggttatctatcccttcaagcatttgtgctttgtattacaaacattctaattatactctgttagttattttaaaatgtaccattaagttattactgactatagcaaccctattgtgctatgaaacagtagatcttattcttatttttctaacatcttagaacatttccacaaacactacctgcttgttaaatatacctattctaatcttcatataatcaattacttttttcctctagaatgtactatgacacatccatggggaaaatgtagtaatctaattaagactatttcctctcattttatatttaaaagaatgtgctctatcaatttatttacttgtacagccgtaggcaacctctaaaatatttaaagttcttaaaagtcagatatttcagttaatattgtgattatatagttgattttgatgaacatgttcatctaccagaaataaattatacacacacattgatatggttaggctttctgtccccactcaaatctcattttgaattataatccccgtgtgtcaagggagagaccaggtggaggcaattggatcttgagggtggttttgcccatgctgttctcctgatagtgaatcatgagatcagatggttttataaagggctcttcccccttccctcctcactcattctccttcttgccaccttgtaaaggaggtgccttgctttctactatgccctttctactatgcccttcaccttctactatgattgtaagtttcctgaggtctccccagccatgctgaactatgagtcaattaaatccctttcctttataaattacccagtctcaggcagttctttattgcacatatatgtgtgtgtatgtgtatgtgtgtgtgtgtgtatatgtatgtatatatgtatacatatgtgtgtatatgtatgtatatatgtatgtatatatgtatacatatgtgtgtatatgtatgtatatatgtatacatatgtgtgtgtgtatatatgtgtacatatatatatatatatatatatatatatatatatatatatgaacagagagagagagagagagggaggaagggagagagggagggaagcatggagaaagagagagtaatagcctaaatagaaataaaactagctccaagtacaggttcgtcaacactctcctatcatacccccaccaaagttaatgttaaccacttggagccctgttcttccttagttgtggagtactttagcaaaattttaaatctaattatgcctaattcaacgacagtgctaatttgaaagtgttagaaactgaagacctataataataatgagagttacaaaacataaatagtgagacaatgatgaatgtagtggatgcatgtacgagggctatcatttgacagtagagatgatgctcaaggacagacaatgagtctttcaatgtgtggagaatgtgctgctgttacagtgatgtacaggaaagaaacaaaaactgaggaagtatcagtaaacaaaacactcaaacatatgagtatacagctagaataaaagcaacagtactagatgacaataagcccaatgttaactcagaaagcagaaggtttttaagaatttggggaatactgtggctgatgatacttatgtctcaagccacagatgccatatgggctctgcgcccagttgaatcggcaccacctggcagtaagtgggcaggtccacgactgccaggacatcccttccaacacttgtggagatcaccaggaaggggggagagacctgccttgacagattttcaatgtgggcgaaacaggtctattttgagaaaagatgttcaatagaacatatgtcagcaaggaagaagagatgatgcttagttctaaagctccaaagagctggcttacactccaacttggggaaaatgcatccgggaaatgcaagattaatctcatcttagccattcttttgaatggatggacatgacccctttctacttgaagacagaaaacataaccatattgatttcaggttttcttcattggtttccatttaggattgttcctccccatcttctttctgtgtaggcatcccagttcccaagtgttcatgaagcacgtatggccttcaggggatgtgtctgtatacattgttatcttatggatgcacggttttgtctgcaccttggttctgaatgtctttactcttgagcatctgcccatgggtccccttctcaaggcctcaatttcttgagtttaacactgcatggcccatgcagcttttcagttaagcatctcttgctatgaccaactcttttcctcagtcaactcccacactcttttcagggacaggaaaaatgtagccacttgctggctgcactctgaggcctcaagaaatttagtgaatctgcctttgcccttcttgctgatgaaatactgccacatcaggccccctcttcggaaacctacaagcatctaattttcttgcttcctccccaactttctttttgactcccccccatccagagagttcttatgtctactgtactaggaaaaactcattcttaaggtatggttttcaaatcattctctggtctggactttagctacggttttaaatgaagaaacaacccagagccaaaatataatgaaactatttccttcttccacagagtggaaactgctttggggttaaagggccagtgaaccaaatagaaaaggatctcagggaacacagattgaagagagagaagaaaaaatatgaaggcattgttggttctcttttgagtttaaaatctagtggggattgtaagcacacacacatatacacacacacgcttacacacacacaccagtgaagttatgaaggattttgtcactccaacgaccttgaatttgattatctaggtcagttgttaccaaagtggaatgtacatgcccaataatatgcgtgctaaacagttggggtagtgagaaaaaatactttttatttatcttgttctctagaaattaatattttgattgtatattttatagtgtatgtgatgtgtaagttgtgtctacaaaactagtgtcaatgtaatttaaaattacatatgtctgtgaatatatatttatatagggtacatgcttaaaatgtgtttacttctgaggtacatgaacatttttcccccaggcacagaaagacaaataccacatgatgtcacttaaatgtgcaatgtaagaaaagttgaattcatagagatgtagagtagaatcatggttaacagaggcttgggaggtggagtgagggaatagagagttactgttcaaagattacaaagtttcaactagacagagggaatacattttgagatctatttcaggaacattttgagaccctcactctaagtaataggaaatcattactttagttaacatatttgaatatgagttgtgatgttctatatcgtttatttggattctactaacccacacctagatttttatggcattacctttttactcactgtgaatatcctactcatagacagatgccctgggaacttggacttgaggcacccaagaactgagacagtgagatttgggggcacaaggatctatggataagttcatcttagtgatgataaaatcaatttggcatgtttcacggacagtgtgcattttagaaagggtaaagacttggaaacgggatatttttgagcccaagtgtttccaataaatagctgtataatttgaagcaaataattgattttttgttctctttgtgccctcgcctgtaaaatgggagaaatgtattcctttctcatccttctcatgaggccattgagagtatctaatgagatcagactgtgacatagcataataattctcatttcttgaaggcctattatacactttgcaagcactgtatgtgttgtttctacttctcttgttcgtttttcctggaataaatatccccccctcctttacattggattgccattattcaccctgtaaggaaggcttcatggttctcattttcatctgagaaaacttaggctcagagaagatcagtaacttatctaaaacacacacatacacacacagacatatctatgcccattattcttaacctagtttctctattcaggagttatctctgctgtctctgcttctgattataatctgtgtaagctgatccaagtgacacgattacagggaaattgtaagccctttgagagcagagactacctattgatatctacattttaaaatttgattttagccaacctgtttatatgcaatgactaacaggttagtttgacttgcaataaatattccaaatcctagactaagtaaatttattaatgtaatgatttaacttgattttttcattggcatgtttccctgaagtcgtcatgcaaaattgaaaaaaaaaaaagtatagtgtgtgattctagattgaaattcaggaatcctccagggttaccttgtttgctttccaaatagttcagattgcttagtctgaccaacaaggtccctgacacttggaactctgtctatccctctaattgactttgtccctgatgacctcgcccagagatactcttcaccccagctatactgtgttgctagagtttctctgatatcccatgctattgtttcctttgttctcttcataaggtaccatttcccacccgccaactcctgttttcctgatggacttttgtttcaccttacaagatcattgctaatgtatttattttgagaataaaaagtgtaggaaaggtcacgggacaaagctgtacaccagacctttcccagacgaacctagtgtataatctccctagtccaacatcatggcttaaggcagtcgatagatccgtcttaatgtcccttttgagttttctactattattatatgaggatttatttttgtctgaattcctccctagatttgccctagagagcaatgactatttacagtttattcctctttgtatctcttatgttaaggccagaccttggcacatattctagctgattagaagacgtttgttgaatgaccaagtgattgaacaaatgaccatgtgctctgccacagtccggtcagttctactttggtttggttatgtgtttgccacattaaagttgtagcctgggaagttcagttgtgagatgtctgcagaacatgaaaaattggaataatgaggttatttctaaaattgctataatttaaaataaatagtggtttattccatatatgaatatacactggaaacaaagaatttctagaatactggagattcaatgataacatcattgaaattaaataaataataggattatgctagttactttctaatttactagaaattgaccgtgtgcatggcacgtataatgagtatcatgggatagttacaaaaagtggtgcttagtgagtttctgtggaaaatctcggtaccaataaaacggaggatttccagaaatcgatattcctcaaagcttgacagtatttatgcacggttacactttgtgtgtctttcgtttgaatcaatggaaggaggctataactgaaaattattgttttagtgtattatatctttaataataagagttttaagaatctatcattagaaataattattcctcaatttgtaattctcaacatttgaacaaataaatgctctgtgtctatcagttaatcttgcccatgaagatttaataaagcacgctagtttttacaaatgtgattttagagatggtcattacttggtaaaatattttgtgttaacacttccatgaatatgttctgtgggaatatactgcctccacattgcttgctcatgaagacatgatttttcacatcatcctatcagtattttgagaaagagattgatcccatattctatgagcatttgaacattctctagtatttttgtttaatcattaaaacaacccttgaagtctatgtgctacactggttatttccctcttgactttcctttacagataaccctctatcataaacaacctatctatatttgttgtctccacatcatgttgccagccctgctttaacacactgcacattgacttctagcagcaaaggctcatgggaggtactctcatcaaggacactgatggtcctcatgttgctaaatttggtgggtcctctacagtctttatcctagttcaccttattatggaccactgtcaactctgttctgcttaaaacactctgttccttgcttatatgactctacactcttaactcctttgtgaattcctcatctgcccttccattaagtattgacgacatccttcatagttttgatctaggacctcttttcctcttacttgacattatgtgggtaatcttgtctttgaacgcaattaccattcttatgttgatgacccttaagctataattccagcccaaatcatttttctgaggaagctacaagaatacacaaatgtctaatagatctctatttagatgtccctcaggtgcttcaagcttaaaatactcacctgagctcatcacctcatctataaattctgcttctcctccctggctccctgatttatttaatatgaccaccatccacttagttgaataaagcagaagcctggacaccatctatacctccaattaatcactaagttttgttgttaaatacgttcttacattttctctctagaatgtcttattttccccatctttacacccaaaaccaaaagtcagatgaccctgatctcctgcttagatttcaaaacactatctcttgcctagactctggaatttcagtcttgctcctctccaatctatttctacaccctagactctggaatttcagtcttgctcctctccaatctatttctacacaaaagctagagtaattttttaaaaaacaaaaatctgaatgtgttcattttctgcctaaaagccttcagtaattcttatttgttcttccagggatagagtaacaactttcagacctagtttattagctagttctttaaccacaaaggactctctcacttgtctactccccctaacacacttcgccctaacctttgccattcctccctttcccttttccttcccagatggacttaagtcctttcagattcttaaatgtttcttcctccagtctcttacatctcttttccttgtaactctaaaaactacttagcttacgcaaggaaaaaggtctgtacaattcccggaatcagcgatcctaacgttccctgttgtttttttcgttgggacatgaattcattcacagtggctctaaacatcaccacccctgcctatctctcccattcctactttatctgagcttatccatactcttgaagacttacatattttttttctaccaggaaatcattactagccttattatcccactgtccaaaccaataagtctgattaggtatctgtatatatttaatattactatatgtgtttttctaacactctagtagaggagaaggtgtatttctttctgttttttagaagcctgtatttctgctattatagctcttaaggaactctcatgcaattgcctactagaatgtaagttacggtaggataagaactggatcagtcatatcacacatccacatataggacctagcaccatatctaacacacagcaggtactcaatacatttctttcccaaataactaaagagtttaaacaaaccaaaatgattaaatgagaagtaactgttttggtaattcttgtgtccttactagagtctaaattgagtgatttttatatcatcagtttatactcccctttcccaaccccaattctttcttttttaaattttttaaatcaaatatgccttaaaacttcaggatcagttgagtaaaatgatgcttttgtcgtcttttgcaaaataattgtatttcagaattttgatttagatattataaacacacctaaaataatagctttagtcttaagatgaagtgcttcttaaactccctaagatgggttggactatggatatgaacatggacaatatcacattaatttgtgtacacagttctaacacagggtctggcatataagaacaagtcagtaaatagttgttgaatggaattgaaaatttaagtagcaaataaagtattttgacctacaaagcaagaaatcacatttttctttttgtcacagttccttaggaagataattaattttttagtatttaaggatgttaaatatttattttatgttctatttactaggcttctttttatgaaaattaattggtgaaaatagcgtacatatcttcctttaccagaacatttacattttgggcagtaacgctggcttttgttaaaaaagcaaaatatgtgtgaaatttatgtttgagttgatttcaatgcattacatttccattttaaatcttctttgaaatactctatttttgacaccatgaaactgtattagatcttagtatgttagcaatgttttgcagttttagagccataattattttaatgaccactttcagcatatacgttttctacaggaaaaataatctcaagaacatgaaaagtgaaatctatattttgggtttcaaaatgatacattttagctaaaatatcatagttttaatttctcagtgaaaaatatagtgtggtaatttatgaagagactcagtgtttaaaaattatgactctatagtcaagtttatgtttataggacataggttattcaattacatttaaaataattaatttagaaaatgtgatcaatgtaacaaattttacctgttcttttctaaagctaaatttgttgtttgaagtgtttcttctaaaatgctaatgaactatcaatttaattgttgagcttagagttagaaacttaattatattgccagaaataaagaaacaaatggatcccaaaagattcacacattagaaatgtatgccagggaaatgcttttgaatgtgttcaagtcatggcttctaactcgtaacttataacttgtgttatgtctggcttcattcccttaagaaaaaggaataataatgccttcggagagcatcccagctgtaagagctatgcattggtgtctaaaaaagcttctcactcctcataccatcctggtctgggaatttaaaaaattgtcatcttttgataatctgtatcacatagtcttctgcatagtcatatgaggttagaactgccccataacttttgcagggcctatagtaagtgtgcaaatggttgcctgcatgccacatatttaatatttataaggtataaagtcaacagactattaaatatatcctatctgctttccttgacaattatacaatcataatgatatggacatctagattcgatttagaattctctctctctcattttctttttcttctttctttctttctctttctttctttccttcctttctttctttctttcttctttctttctttctttctttctttctttctttctttctttctttctttctgtctgtctgtctgtcttgtttttttaaatagtgcaagcagtttattccctggcaaggaatttggaaaaaactcaaatagcaaaccacttgatacaataaaataaattccttagagttttgtactggaatgaggcagcttggttagagctaaccctaagcctgttatttaggatacattggcttttcttaagcttaaaaaaaattttactgtgttaatgacatttaacatgagatctatcatcttaataaatactacatgcacaatacattattattgactctaggtagaatgttggacagcagatctctagagctaattcatcctacttaactgaaatgtaatgtctgttgattagtaacttcctatttcgccctatccccagcccctggcaaccaccagtccagtctttgattttatgagtttgactgttttagataccttatttcaagtaagtggaatcatgcagtatttgtctgtgtctgtcttgtttcacttagcgtaatcttaaggtccatccatattgtttcatattgcagaatttccttttataaaggctgaatagtattccattgtgtatatataccacatttatctattcatctgccaatgggcatttaggttgtttctgcatcttagctattgtgaatctgttgccttttttccctacctcctttactccatcctgcactgtgaggaactctgtgcacatagatctggtcgccccatttcccacccacatgttcaagtttttcccactcacctcatgcaaagatttaccccttagccatacccagtaactgactttgaaacatttgcccagggagttgagggattctgaatgccagatcatgggagcggggcttctagtgagcatgttggcttggtcctacagactcctaatcagagctttgcctttgaaagcatggggcccaagggcaaggaccctacttgttaaggtctaaattttttttctgaaataaccacatcgagcttttatgtgtagatggcctaaattgggctaacccagaggcagtgacactcaagtagtttacatctaagcgctttccatgtgcttcttttcccatttctgttacttcttacaaaataaaaaatcagcatctcaattaccctgatttgatcattgagcaatctaaaaagtatcaaaatatcacatgtagcccccatatacatacaactgttatatatcactataaataaatatatacacattatatttaaaaatcaatactttaattttacatgtttaacaaatcactagcatatacattccagattgaacttacgagggatgtggaaaagattcagtgactaaataacaataaagtactctaaaaatgaaaatgtgaaatggagacagtataaatctaaaatcatatcacttatgaagtattgtttcaaataaacaataaaatatatcttcaatcaatttaattttattttagttgtataaaatctttcggtcagcattaacctaattggaacactaaataggtacatctaaaaaatataatcccccccaaaaatatgtagctcataagagataatgcattgaacacagataatattggcgttaaaaacagaactctaccacatttgcaacgaaatgtttatctgttcttcctactagaaaataataaaatagttctgcatgagcttgaactcgaagtattaggtgtacaaagaccttttagtgaatgaatgctagctgaaaagcaaattttaaatatgaaaaattagcaagacaaacatttgaatttgtgggagatgagtaaaactcctataaaaatgaattgtttagtgttaaacagattgtgtatgaaatattaatggcatattgtcctgagctccccttccgctgtttccatgtagatgactgaatttcaaacagaaatatgccaggaatgattacgtgaatgaatattactacatgagattgcttaaagagtatttcttcttttgccttctttttactttcgttatttcatttagtagttagaaaatactgtctacaaatatgtgagaactgcttaatttatttttgagacattaattaattcaactaaactatattgactgtgtgagagagattcccttggtgaatatgtggatttttgcggtggtaagaactctcctctggagcgcaaatggtattgctctaggaataaagcatatacctcaggcccagatgaaccagtgcaatctacagtaacaggttcaaagatgacctcatgacctactgtggactaataaaaatcaaggagacctactgcaaaggtttctgggaaattctttttctcttgcgttgaactaagtaatatacatatgtgatagttagagctgcagcctttgtaataccatgacagaagataacctgaaataaggctgacagacacaagagggagacctaagagtactgagagatatggagcaggaccccctgattgaacttcacttgcagcccccttctgcagttttcaatgacgtgaaccagtagaatccctttgtttactgtttttgattaatttgagtgcagctttatgttatgagcaactaatagcatcctcactgtcacaactgccctctatacggcaggcactttgtgatactaaagaaagcagtatacagagtagagcccagtgaataacagggcagatgttgcaattaaactgcctgtttaaattctagctcttccactagctaacttgtgactatctaagtaatttaaccttcctataatcatacctatcttgaagacttgttgtaagatttaaagcacaacagtgctactataaaacaggtatacagtaaagcttagctacttttttattaggccatatgatatcatttcattaaaatcttatagccatgctataaggtattatgatcctcaatttataaataagacagctcaagttttggtcaagtgactttaccaaggtcatagagctagaaaataatgattccaagttacaagccaaacctcttcaatgccaaatttacatcatcccccattacttgaagtgtaagattcacatggacagaaatttttgactgtttgatcactgctatctccttatcatctaaaacagtctctggtccatattaggtgttcaataaatatttgtagagtacataatttccttcacagactccacaatctggtgaaggaggcagacatgtaagagaattatttcaggattccacagttgatgctgtaacagagctaaatataatgaatggaggaggaatgaataagtttgtctgggagcaatgctatggctattgaaataagtcttgctcatgctttgattgaaatggtggatatagatcacacaacaaataacaattagataacagcttgttgggagaaagcgaggatcagtgtttgccataaacatttctcatagctaatgtcaggtgtttgatttctcaacattttatatctttgactttgattttctctgtttttattttttaactccattctcaagaagtctgcacataagagtttcaacatctagcacttcataactccgtcatctcctctcaggcttagagcaaattctgagacgtggatttatcgtcgagtgatttcttcctggcattttatctctgagaccaggatctggttgctaagcatgtagacatagaaatgcatttcttcattgaaccccataggttcaaactagtggataatgagcacaatgtcaatgtgattatttgtaatgggggaaaggttaccggagaatattacacgaccatccacatagactaacattttcctcatgactaagtttacttagcaaaacaaattaaaaacagaagtttgtttagcagcacagaattgaaggaagacaaccagatggttatgaggaagattcatccaaactatgccagaactgaaagaaattaagttcattcagtacaagaattgtctagaataagagaatccattttgtgtcagcacttcccaagttcttgttaatgctaccttaagttcaattcaaaccaggcagcatttattacgtgttgtgctgggtcctaggaggaccgcgttttaagaacttactgtgatcttctagatcaagtttttatttcaatatttctacctcatttctgattcttaggtgttccttatttcccaatttatcccctgcagaaattgaggcaataagatgtctatcttattgcctatggtgttgattatttatgttatattctgttttgtgaagtttgacctctacctaattaaattacattttcaattgtatcttggattgatttattcaataagtattctttaatatttttgcatgaggtcggtcaggtttcatcagacattaggaattaattataaaaatctctagattggtacttggagcttaaaggaataaggtggtggaacgttaaatgaggaggaaagaaccagcagagctgggataaaattcatctctatcatcttcccacctgcttgatctctggcatataatttactatccgtgaacctcaggtttctcttcagaaaagctgcagggttgttgggggaaataaggcaattcctgggcttcagtatgttcaaaacagagcattaatattattatagacttttgatgatttacacaattttagctttttggcaagacatatttactagtactaagtaaaagcacgttgactttctaaaatgaaaatgtgtatgtgaggatgaagaaaaagaaagtgttttgtttgataatatagcattataacactgcacaaaaaaaaaatggtatatgcagagacttccatcacttgcttatgatgccgcattgggatctcattaataagacacttcctcagacacttcctttgtgttcaataaatttcaatttcctcctttccttcagttcacttcaagaaggacggcagcaactttcttgttgccaaacctgacaaatgttttttagtgctgattatactcgagcattctgtagcaaaatgctgtgggtgaaaatgccttccttcttaagggaatttagcttctgtagtaccagaatctccttgttgaatgaacatgtactgcctaagtcttagtaatccctcctttttgagcccattttctggcatctctccctttaatattcctcaaaaagttggatttttcctggacttttcatattacagactttcctttggtcatcctcatccattccgtgattccaactacattttccctccatcctggcatcttctttcttccagacttgtatatgcaactgcttccattcatacacttgaccaaccttttaatttctataagatcaaaaactcagctcacaagctttcccctaccatcgagcggggttcttcttttgcttctttgtttcagacaatggcaccaccatactcgagtaaggcacgttcatttatcaggtcctaccaaatctacaataaactctcttgaatttatccacttgttttcatttgaacagtcatttctttacctgggtagcctgcaccttctacctgcattgattcagcagtctcttcaccactggctctccctccctctcctgcctctcttcttgctccttcaatttattctctactcttcatagtgacttttattaatgcaaatatgaccttataactcccttgcttaaagacccactcatgtttgtctttgtatccataacttccggcctagggcttaacgcatagcaggtgctcagtaaatctgtggtagatgaaagaacaagttgtataaatactgaatggtctgatgtgctctttgttgtgtcaagaaggacattttgcagtcaggatagctacatcagtcctttagtaggcatttgacagcactcgcattattcctcaagagaagatggatgtattgattctgtatttcaaatgacataacttttgtgaaataagaggctgccacggtaatctgagggatctctcaagttcaagggactccacagtgctttgtgtaaggtaacaggctaaagggttcagtcttaaactttcttaagactgtagttcagggttcctatggtggggctataaccctgaattacatcctctttcatttcatgctgataatgagaactacaaaccaaggggtattaggaaagaatccaggtttgatgcagggaaaaataaaaacaactgataatctctagtgtccccaacttcaagaattcctttcttctttacaccaagctttttttctctgccaggacttactttgtcttctacatgtttaagggagaaaaatgagttaacagaaggggaggtacagcatttctatttacttagatgctagagaacaggatgaaaggtatgaaaaatatgaaagtctctctctctctctctccccagccttcccccgcttctctctctctctctctctctctgtgtgtgtgtgtgtgtgtgcacgtgcgtgtgtgtgtgtgtcataatactcaacctttcttttctttcaagcatatgttgtggcagagacaagtgtacatcaaaattcgtggtccctctttcatagtatagagttcttgctaggatccagctgcaagccagcaactacatttcccagccccactggcatctagttagagccatgtgactagttgtgaccaattgaatgtgagtgggagttatgttgcaggcataccttttccatcttcttacttcccatttgctaaccttatggaaaagagtcccaaagacctaggagatgaaaaagcctaaaatggaaggactcagagtccctgaattactgggtagagaaaagctgtttgcagatgggaatgcccattttgtagtattctttcttttcttaagccactaaaattgtgggatctctttgttatagctactggcattaacctcttacgtatacatacagctatgtgctacaaagaggaatagatacattttttaatcgttgaaaggggagaaagaaacatatttaggaggaaaataatttagtctctacaattgaaaagtgttttatgaataatattttgttttggcagcatattaaatctcaggcagctgaactacattaattttcaattctctatatatgtttttgtcttcagggtttagtaacactgatatataacagtttctttcttttaatttccaaatttaaatgtctaagtttgccttctaggcagaaattaagtcccattgtggaatgagattggatcaacacttcaccaagatcattttagttctttgtaatcttaaatgaaataagctaataaagcattaaattagcatgttgtaaaacttcgtgaagttttaatatgcttctaagtggcagctcttagcttattatctctaaagctaaagtcaaaataaatgtctcagttgatgaaatggagatgaggcaacattttatcaaatttaacaaaatattttatatctgaattataaagtccagattatctagtaattatcatataaatgtatttaaccagacatgcatttttctctaatcagtagccctggagtctttggaccacaaatgtgccttatctcaaatgctttaactgtgacattttgctttagactagctcgactacttctacagaaattatacacttcattcacattcatccagatgaaaaaaatacatgtagaaatgatcataataagtaacatttgtttaggatttcagagtttacgaagggtttttctattcactttctcacttgttcttcatgtaaactggtttggtggacaactgtcattatccctgttacctggagcccctgggtcttagggagacttcttgacttctcaaggtcatgaaggtgctaactctgaccgtgtttttattcctactgtgccacacttctcaggtaaaaatcatattgcagacactttaagagaagtacttaagaaaataaattcctccagagaattacatttaagttgtttcattaactgcagtgcataaagaaaggaaaagtgttcccaaacccatgtagtattttgctattgcttatggtaatattctgcacacctaatattgtcagcataattttccatgtaacaaaatgtcctaaatcagcaatgtccaatataactttgtgtgatgataaaaatgttctgtctctgtgctgtccaatacaacagccactagatacacatgactactgagcaatggtaatatggccagggacactaaggaactaaatttttatttaatattaaataacgtttaaatttcaaaagccgcatgcggctagtggttgtcatcagatactgcagttatagaaaattagaatttacctctttaaatactaaacctatttttaatagtaggatttttaaattaaaatagttctaagtgcttttaagtgatacgaagtcaaatgcaagatttctgttttaatagtactctcaacccagagacaatcttcatgcatccttatacatgttctttgttgccttattctagttttattttaacattaaatgcctctgttctacttgatattgacttgcttcagagaacaccaagtatagtggaaagaaacacacacatgaggacttgaggctaccaaccaggttcaactaaatgcactctgatttaattgtagtattgggatcccctgttgcatttattgaagaagaaaaaaactttgcaaccaaaaagatatttgaaagcaactgttcttcttggacacatgatccctcataaagtggggcttcctgcttttcagagacttaatttctgttcatattcatttcagcaatagtaataatgatgatggcgatgatgataataatcatgatgatgcctaagtgttgtagtaatgcttcttctgagccagacgttagtcaaattactttctctacattaattcaggcaatcatcacaacaatcccacaggacaggttttattattatacttatttagctagcaaatgatataactaggttaagttacttgcccaaggtcatactgccaagacagtggctctagtgtccctgcttctgaccatatgttatgctgcctatcctagagcttttctcttctaaaatagtaaaataatatattctttgtttgtttcatacttttttttttttttttttttttgagagggagtttcgctctttcgcccaggctggagtgaggtggcgcaatctcagctgactgtaacctctgcccccaccaggttcgagtgattcccctgcctcagcctccgaagtacctgggataataggtgcccaccaccatgcctggctaatttttgtgttttcagtagagacagggcttcaccatgttgaccaggctggtctcgagttcctcagctctggcagtccgcccgccttggcctcccacagtgctgggattacatgcatgagccactacacccggcccatacataaatattttaagcgaagtacacatgcatgatcatcatacttttaataatttcatttaactgtttccaaagaatgttagtatgaggttttctttttttctttttataatttcaacttttattttagattcagcgggtacatgttccctggatatagtgcatgatgatgaggtttgctatatgaatgatcccaccacccaggtagcgagcatggtaaccactagttcttcaacccttgcctgttcccttcctccctccttcctctgtagtccccagtgtctattgttcctgtctttatgtccatgtgcactcaatgtttagctcccacttttaagcgagaacatgcagtactcgttgtctgttcctgcgttaacgtgcttaggatagtggcctccaattgcatccatgttgttgcacaggccatgattttgttagtttttatggctgtgtagtattccatggtgtatacgcgccacattctttatcctgtccaccattaatgggcacctaggttgattgcatgtctttgccattgtgaatagtgctgtgatgttatatgtactttttggtatattcaaagagaaatgctattttcctcttgacatatttatgtcaatttaacatatttatgtcccttttctttttaggagcaccattctcttcctttaacattataaataaaatattttttgcttttctgtttttgtaagtgcagttttattgacagagtgagacatacacgtcgatattgtgactagctgcatgtcttctattatttagaggtctcactcaaatgtagattatcaaattctgttagtgaagagggtagaacagcagaactaatgctggtttccttctctagcattatttgatgataaactaagatgataataccccccaggtcttagatacctgcagtaggacaggcaccctacatttaatgctcctaggaatccttcaaagtgatagcatagttattatacagtaattgagaaaactgatgttcataagttagaaatttttccgaagttgcaaagaaagtgaatggaagaattataccaagttctggccgggcgcagtagctcatgcctgtaatctcagcgcttcaggaggccgaggcgggcggatcatgaggtcaagagattgagaccatcctggccaacatggtgagaccccgtctttactaaaaatagtaaaattagctgggcgtggtggcacgcacctgtaatctcagctactcgggaggctgaggtaggagaatcacttgaacccgggaggcggagtttgcagtgagccgagatcgtgccattgcactccagcctgggcgacaagagcaaaactccgtctcagaagaaaaaaaaaaaaaaaaaaagaggattataccgagttctctttgattccaagcccaaacaaatccttttttgcaatatatgacattgtttccctgtttgcattccccattctgtgtatcacacatcctgtggcctgatcaaaattcattttcagattctgaatttattttccattgaatctatataaactataaagacagaagatatatgtatgtgtgtatacccacgtttctcttccagtgtcaactgataaaaatagatttcaaagtctcaataacctttaattccctttttctcttaaaaattctttagaacttgtacatgacattctgactctagcagattttagaaaacagagaggccattagatattcataccttactattcagatgaagtattcaatgctaaattatgtaatttatctgctttgcaaattgtatggtcagattgagttccacaaaggagagataatttttaatataggcattctgtagcttccctaattattgaattagtttagagcaaaatccttaaattgtatcgttgctatgctcaaattttgtatacttgtccacgtaggctatattaagatttcattgaattttggtttctttctcagtgataattcaatatatcaactcaccactcagatttgcctttgggaaaatccaggccccttttctggatttttagagcagattttaaaaaagtgattctgtatatgtgttgaaattaaccacatctcattgcttttgaatgattgaggtaatgtatacctactactttaaaaaaaatgacttacttagaaggtgtccatagttttataagttccattgaactggtttatattgtatttagaaaggaaaactactccttttatccttaagggtgaaaacctggattttattatacaattaacacatatttattttttattatgaaatatatcacaatataaacgtttacagggagtgtttaaagtggtgttgtccaatggaaatataatgtgagtcaaatacgtagttttcaattttctactagccatattagaaaaagaaacagagaaattaatgtaataggatactttatttagcctagtatatccaaatcacaattatttaaatatgtaatcaatataaaaattactaattatgtatttaacctttttctttagtaagtctctgaaatctagtgtatattttacatttatggcacattgcaatttgcattagtcacatttgaattgttcaatagccacaggtggctaatggctaccgtgttggacagcacaggtttaaagaataatatgaacatctgtgttccaacattctgagtttcaaataagaagaacaccatcagtattttgggagaagctccctatgttaccccttgctaatcaccttccttccccccagagccaaaagtaaccattatcttgaatttctagtaaacaatgctcattttttaaaaaacgtatgttcaacacctgtatttgtatctttaaagagtagctagttttagtttgcctggatttgaactttatattaagggaaccaccccatctctaatcttctctgtgaattcttttctctcaatactatgttttacatatttacgttcatcaatgtgcaactcattgtatgtatataacacaatgtatatattttacatgcgtatggacatttgggttgtttttatgtttttgttcatcacaaaccacaacacacatgtgttcttgtatatgttttatagtgcatgtttaaaaatttctcaacagtattcgctagtagtattgtcaggtcatagggtatgcacacataaatagaaatgattgattagctgcaatttgtagtgcacacatatttgctatgtaagtgatccatgtttaagactttaactgaatttaaaaaatattttattggagccaatctaaatgagctaagggtttgtattgtttacataagcaaagattacacttactgggtcaattcggttgattaactttggatatataaaatatatagctagttgttaaatagatataattattaattggcattacttttgtttgtatataaaaatttcaaaatatccatgacttaagcaaggtaaacacccactgggtggcttaagcaacagaaatgtatttcttgcagttccggaagttgaacgtctaagattaaggtgatgacagggttggtttctggtgagtcctcccccattggcttgcagatagccgccttctccttcatgacctttcctctgtgtatgtgcatcccttgtagctgttcttccttttatgaggacattagacttattggattaaggtcctacccatatgaactcatttaaccttaattacccctttaaaggccctacctccacttgcaggggttaaaacttcaacatatgaatggggttgaggagacctacttcagtccataacagtttctatattctgaagatggtctttaattaactaaacagttaatgttactttactgggaatgtcttttggatgggggaataagctgatgatatgagaagggttggtgaatttctcataagtgtgaaatttgttgggccggcccagcatgattttcaatcaaatacgctttggggacaagtaggttgaatcactacgagaggtttaaaagaaagcaagttgtaattgcaacttttaattgaaagaaagacaggctttgttgatgtgccagcaagactgataactggctttaacgtagatagtaaggcagcagattcaatccactgatcgtgatctactagtgaatttcaaagccttatgcaatagaactacaaaccctttccttgcccaccttgcaggtggatccataggcaaaatgaacatttgcaaaaaagccgctatgtttcagaatttgtgctagggctttaatatctataatttctccaaatcctcacaatttaagaattaattcaacttagccccatgaatagggtgaaaattctgagatttaacaaactaaaataagttatctgaagacagacaaatagaaagagttgagatattctatttgaatgtaaaattttcaaaaagtagaatgacagcgtcaggaattacagtctcagtgttgaacacaagacttaggaacaaatttgctgcatgtaatttcattgagatgggacaaagtacagcatacgtaaggaagttttagaacaaataagataattattttacgagctttgaaacatgtgtaagaaagatacgaataaaagtataatcacatttgactaaaacatgaataccttaaaactgaaaagcactgagattatcattatataattttgaatattttaaaccacaatgctttgggagtgcactgtaatattttagaattggaattttaacttactggcttaaaaagtaatgtactttgttttaaattcaaagattatcttgtaaattcagttcgatctattgaaaaaattataaaattcggcaagaagccaaagaagaacaattatgtagctcaagataattaaattttcatgtttggctttagaaatatattcgtcgtgacatagtacatggtaatctagtgagcccagacaagtagttttctctttttgtcaaagggaacaatttgatgcgtgttcaagttgcttaaataaaattttgtatgtgctttctcatcacaagagaacaatatgatttttgaaattatttttactttataaaagaaaaaaaaaagccctcacagagaaaaaagaaaaaaatgatgatgtctttgaaaaacaaagttaatacagctttacatatatttgacctacatcagggttaatatttttcaaggtgaaacattagatgctggaacttgcaaaaacaggcaatcctcctttagatgaaacggacactctaagggttaattcattcactgagacctattgtgaagtaagccctacagagactgaaaaagttaaatgcaactcacaaaagttgctagaagagtcatgatgttaaaataaaataagtacacaatgtatgctgcaagtatacttagagccatgctaggtgcggttgagaagttcaatacaggtccaagataatagctgcttctcctatagaacatgtcttctcattggagggataagacctgtgtctatgaaacaggcgtaattacatagctctggaactatatatgccgaaataaatgagacagtaagtgttattgtactataaagaatgaagaaatcatgatgagaagtaacagttaatgaatgttttctagaaagagtaggatctgaattggccttaggttgtaagcagagtttatagatagagtagtggtatgtcagagtcactctgggtgcttaaacatacaaatccccaagtctcacccaaatgtgtcttcagatgaaaggaaaaaacaaatgacttgagctcccccgcaaagaacacgggtggtatattgagcagccaaggagtgaccagagtggcaggcccatgttgagggacaaaagaggacaattagaatatgattaatacaaatttacagtgggatgagttgttagcctgaggagcttgaatgtgaacctctgtgcaaaaaggagtcattaaatacttttgaaaaaggtgggatgggaagaaaatgacattctcaagacaattagatcgaacagtattaagcatgctgacttattaagttatgcaccttgagagggtggaatgagggaaaagggtctttatctggagtaagacaggaagaagctaagctgtaattcttactggactgtaaattatgtgcagatatattatctgtcatgttcgtgggcgcattctcagtacatagcacttgaaacaggtactcgataaattgtcaaatggatgcatggagtgatttccatgcaaaatctaatattgtatagtattagaagggggaaaaaagcatggcattatgctagcagaaatgtcatttggtattgaggatgaaacattttcaacagtttgcaaagccatccactcaaacattctgtcactttccaataattttgaaggatgttctttctacttctaccttattacacaatgagttgagtaagataaagaagtcatgtgcaacaaaacagagggagattttctgaaaggcactacaccaggaagttgttgtactcttgcttcatcttgccatcttggatatacttctggcgctacctccaggccagttcctcgttacatatgtcatttacttcccacatgctagactcaccgagttaatcattttgctgcagttaacacattttagcagagtgtaggtttatgggtgagaaggaaatcaatgatgtttcaatacagggttcttttcccatcccccttatttccacttagaactgtctctcaagtcttaatttgcctctaaacttttttcccagcttacattcttttctgaaaaatgcaacgacgatgccaatgtttgttgacctgaaatacattgtaaaacattcataatactttgagcagagcttccaaactcccatttgcctcttttatctcccttaccttggcccctttttgaaggcaatgtgatatttaatccgtttctattgatgcttcaaaattattgaaaaactggtaattgtatttttccctttacttatcagttgctagttgacaatgagtgtttgcccaaacaataaccaatcaaaaggtaaaaaggagattccagacatatctgagaagaaattctttggaagaagcccgtaaatggaatgggaattcaaacaaagccgtttccaaaagaaatactaaatggtctctaaatgcaaaaggattgctccccaagcattttatgggagcataaaaagctcccaacacattttatgacaatacttctactcaatgacttcttgtgttgacatatttgttgcactcgacgttagtatttacagcttcttatcccaaatatttacttaactgaagccctgatgtttttaaaaacttttcatctgtgtttaacagcccattttacagaaacttatttgtttcatcaggcagatatttactgagaacttgcaagtgccatatattctaaaaatgctgatgataaaactgtgaacacaatagattctcatggtgcttatggtcagggctagcacacacacttgtgaaatgatcactgatgatcaaaggcataaacactacatttggaagaaataccgagggatccagaagtatcttggaaacactagcaagtatagcagatggtgggattggtgcttcaaagaacttcttgtggaagatgttacgtatgtaccttctctgtgccaggcactgctaggaagtgctggagagaaaaagatgtgctagataccgcctctgtcctatgtgcttgtgctttgtggggaggtgagtaggataatcccagttctcatgcagtgtaatgagtaccatgacggaaatgcactccaagaactaggcagcatgaccagagataggacatttgagaaagacttcactcgggtggtactatcttagtctgggtgctaaaatagatgtgatagatgagtaagggtgacccggaagcaggagggaaagggaggggctttcagaacaacaagtgcgaggacattaaggtgaaatagagtataatagtattcccagatccttgggattgttctccattaggctaaaacaaaggtgttttctcttctttaagatttcatgactgcagattgcataacagaaggtcatttaatagacctctaaactgaaggaattcttgaattaaatcacaacatatcttccatggccagagaaaccattgcctccttatgtcgacattactaacagcaccagcacctgctgctcaggccagcgggagggttgggtgttgctgcctaggtaatgctcaccaactgatgtcctgccatgagtagttttgccaagttccacaaaaaaaacttagtgttctatcagcatctaatgagaattacagtcattagttaaataaaagaactattagataaggagcagaatgaacaacacacaatccatcagcttggtgaatggtatcagatggtttctgggtgctgggcagctgtgcatccaagtagacagggagaatatatatgtcctttgccttatgtacttgtttctctaatccaaaggcacagcaatccgtggaagctgctatgataaggtgtttagtggtgaaaatgtcttgaaagccagtagattattaaagtgatgtttttaaaaatgcagatggagagtaagtactttttatctagagtagtagttctcaaagggaggtcccgggatcagcagcgttagcatcacttgggaacttagacctgcatgggccccattccagatctcacttgaaaactctagggggtgtagcccggcagtctttgttgtgaccagctctccagggggttctgacactccaaatgttcaagtttcagaacgctactcacaggccatcatgctcggcatcacctgaaagcttgttagaactagaaagtcttggccccaccccaagcctactaaatcagagtttttgggagtagggccaagaaaactgtgggttaacaaggtctccaagtgattcttattcatgtcaaaatttgaaaagcgtcgatcgaactgttggttctcagctttgattgcgtatctgaatcacctggggagacagttgagctattccgggcccagatcacatctagaccaattgaatcagaatctatggaggcaggacccagacatcagtattttaaaatatttcttgaatgatcccagagtgtagctaaggttgagaaacactgttctaggattaaaggattaatgtgtttgagagtatgttaagatcttaggcaaatcacaagggtgttaagaactaccatcttcgcaaaaggagaatgtgcctcagatattctggtactgctttgattttaccttcagtagtcttacctattttgagtatgcttagtagtactaatatgaggcttattactaatatgttaaaatttgtcttttaattaagtgggtctaaacgttttaatctttaatctctgacccaactagaacttttctaaacattttcataatagtctccaccttgtcttctgaccttcacttatgttctttcagggttcttcgtgtgttactagtaatagtaatggcaagtgtttattgaacacttactatgtgaagattctaactggcttttaataatcacatcagctctgggaggtagaaggtagggatcctccttgcttatcaggtgagaaaactgtactatagagaagttagcaacttttcccaggtcataatatgtgacagctaaagggagcataatggttggaataaaataaatctactctagttgtaccgaaggctcatatttgtctcacgtacttgatttggtcgaggcccaaggggtcaatttccaatgcttggattcctggatatgtagagttgtattaaaaatgctaaaaacctattatgtatcatacaatcatacatatcacctaaagtattatggaaatgaatctgtattattaagggaaaaaggcctgtgtgaagaacaactgaaacttcattttaattgaaattaaataacatgcatcatacactaaaagtgcacgttatgaccccatgaattacttcaggtggctttgattcatgttacatacactaacaaatatagaagagtgatataatgcttcttaattaactactaatggaagtttactatttaactgcttcttatgtaagaatgtaaatgttttctgaaatatcagaacttttcattaggaagcacttttaaaaatagcaaaactgatatgcactatgatttccatatacattaaattgaacttgtaaatgatgttataaattatagaaaccaaggggatgttcaaattagatatttgtctaaataaatcatgtatggattgaacaaatactcattgagaaataaatgtattccttttctttcaattatctaggattccttgtttatctcttcagaagcaaaatgtcttctgtccgttttatttccagttaaacattcttcagattatgtaaataagttaacttccaatcctcttatttctgtttatctcaccactcttctaatttagacgtgatcaatatcttatctttttgcatttcatagacatcaggatccagaataattgagtgagctcaaaacaacaatggcaagaatgatgttttcagaaaactcagcaatcattcgtttaataaatattcattgcctaccaactataagcaaagtattggctaggccatgtggggtatacaaaaatgtattaaatatggctcattctccctaagaacttacacctattagacaaagtacatgcataaaaattataatgtataatagaaaataaatacaagccctagaatgcacagttgaagtacgatttgcatttattataaaaagaaagatgaattggctgggcacggtggctcacgcctgtaatcccagcactttgggaggccaaggtgggcagatcacgaggtcaggagttcgagaccatcctggccaacatggtgaaactctatctctactaaatatacaaaaattagccgggtttggtggtatgcacctgtaatcccagctacttagcaggctgaggcaggagaattgtttgaacctgggaggtggaggttgcagtgagccaagatctggccattgcactccagcctgggcaacagcaagattccatctcaaaaaaaaaaaaaggaaagaaaagaaaagattaatttcctgttagctaaatcaaggaaggcttcatggagaaaaaaatatttcaacacacacttgacgtagcagtgggatcaggctgatgttagggaagaatgaatgacattctacactgagaaagagatattcagtatatatatgaagagcagtagagaaactaacaagtggaaatagactcaatttacaatacttgcctgcctggagtactctatacgttgactgtaagttgcagtttactcagaacaatcccactttctacttgtttatcctatgtaatcatttattgggcctccttttgctctcaaaaatatccttgtttggataatagattatcactctgttcctaaatgaactgccctgtgtcctatcccagtaaaagggtgcattcgggcccttcgtaactgcctccactacatggttgattgaaaccagagcttggcattaagaagttagctgaacaatcagatttctattcttggaaaacccaagaatttcagaatagatacagaagctgtatagctttaataacatgacagagttgtagccttgaaagctatgtacaattcagaattatgagggagaagaaattgaagaaacagtagcagccgggtaaatgcagaaacaaatgagggagacacctagggggtgactgaggcacaataatggaagagaagtgcagtgaaattgcttgaactcttactgatgagatttctactgttgccttgaatccaggaccacctatatgttcattctttgtcatgctcagagttatgacagatgctgttattgaattccccagagactcccttatcgtctcacctcaaaccttacaataatcccttctatctttctatccatccaagctggcttaagtaaagtctatgatccatattcctagtaaacagagaagggaaagagactgaaggcaaaggccccaattagtaggctattgcaatatttcagggaaaaggcaatggccatcacattgttgtcccaggaatgagaatagaaatgaaagaagataatgaaagttgaaaggactgggggggcttgacaactgtttagacttgaggagtcagataaaataggaagccaaagataattcagaatattttgattttgattttcatcaccaaataagatagtagtactatgaagaaaaaatggttaaaaaacaataataataaagagaactcctccaaatagtaccaagggagggagtttaatagaggaaattaattccgtaggtgatgagagtcctgagaagccaaacgagaaaagatcaaaacaacccagggattggcagtcgcaggaagctgttctcacttatggctggggctttaagcacaaggtgacatgagatttcagaatttgaagtcgtctggaggcagctaggatcaggtggggcctgtcctgttcggcaggacctgcaaccacaggaggaggatgcgtcaagcagaaagttggaacacaagaggggattcagccataagccacaaaataccttccagagcagagagaaggagaaataccctgaattccgtattttccctgccatttagttccctgctattgccacacattgacgtattccatccagagaagtccattggcatatgagtctgggaaatgtagttcccagggggacatgatcttaagggaaatagacaatgactggtgcaacaactgacctgtgtgaggcaggagggaaaaaacaggaataatatagtttttctctagatcccttcatgcacaaagatgcaaaagaaatgtgttggcttaatgagccattctgggtggccctgtaggtggctgtcctacgaataagatttttagacaaaacagagatgacttcaaatgtcacaagaaaagtatcagacaggaattaatattgacttgatctgtcacaggcgtcaatgatttgcattaagccaacgatcttcattgttaatgtctgggaaattgccagcagcattacgactacttgtgtggattagtgtaacggattcccccactaacattcaggaaatcatgtcaagcacagagtgcctatgtaagagtggttgtgtctattcactacatttcttggactaataacacacttagccttcctgaattgccaacatgtacaaaaccagattggggttttttagttgttcatggaactatcatttattgggtagctcctgtagaagcaagatacagaaactctaattaggaataagacagtccctgtacttcaaagagctctcaggggaggcacacaagtaaacaagcaattattatcatacgttaggataataccgtcatggtgataaccactgagtgatagccaaacacatggaagaggtacccaagtctaacttggggtagtcagagactgctttcaaggatatccgagtaagtgttagctaagacatgatacgtatttctaggagggaaattttcaaggcaaggtggagattgtgcagtgacgcccagagcctggattattttggtgactgctagtatttcagaatgacttcagcaaaagttgtagagaagatagaagacaacaaagtataagcagaggccagataatgaggacctggaacagtggtttgctggtaaatgtttaacaagaggctcttggcggggagagagagtgtctgatttgcagcatttggcaaattttgttgcacaaatgctccagcatagccaatttcaagctaccagtgtgacgtcattgaatgcagaattggaaagaaacgggcagtagcacagcattgtatagttattttcattacccagatataatagataaaatatccagatggtatttaatagatatggatgcaaaatttaaatatatgtacattcatgtgcttcatgttactgaatgcgcacaacattcattatccattcattcacgtgttaatttaacaaacatttctgagcctctgctctgtgccaaacgcagttctagctgctggaattacagcactgaaaaaaaaaatttgtcctcactgaggtaagacaaacattattatgcccattttacagctgagaaattaagacatatgaggattaagcagtatagttaaaatcacacaattggtacatgaaggaatcaaagaggaaatcagctctcagattttaaatccagggactcgtttctgctataccatactacctacctagttgagctggattttatcatggtttccctatttttatcaccatgtggttggataagtaaaataaatatatgtgacctttcaaataaatttgggtcatttttcttggaagctcatctggtgtgaactttaaaatactgcaattaataatgattataataccctggaactctgtagcaacctcttttgaagaactccaaggagcctctaaatgtatcaaactaagttcttcaagtgaattagttatcatctgagagtaatatagacttttaaaaatgcattaattgtattaaccctttcaggcccatagacttaagtgtttctttctccaaataaaaatagtaatctctgtccattttctttagagaataatgaagtaattttcattgaatatgtagtcaacataattacttcaattcaatcgtgaaggattttaaaaattatttatgtctactaacttaaagacatgcatagatttcaagaacttaaaaatgcatattgcctctttgccctatgcctcataaaacaaaattatgataacgttgtgtgttacagaaaaacgcactgattgtaatgaagggtgcttcaaaggccatgaacttggaaagcaacttatttacagagacccccagcaatagcagctaaaagattgactgactccctttattttcagttatccttcagacacttttgacctcttcctgtgcctttctagtcatgtgcaatcttgtggatatctcttccttcctcttgttattttctatttcctctgtttctatttgtttctaaaaataatcatgtttgaatataggattagcttccttcccatctccccattaccaatctctcactataccgctatgttattaatcttcctgagaaatatatcaggttcattacattagttaccagctcaaaacgtatcagtggctttctagtcctcacaggctcaagttaatctgcatattctgactttcatattctgggttcatgcaaacttttcaactttccctcttatacctacttaggaggaccctcaggttccatcatgctcatgtttcaagccagaagttctcctgcctcttcctctatgtagactccacatagactatgatatcctgcttctcttttaatcctccatcttcagctcacagccacactcctctgtgaacagttaaatgattctcccacctcttacctcctatagcacttatttttcatgcagcatttttgagacttaattaaatctacagttttaaaaaatgtttttctaccacagtctcttattcatactaaaactttcaagtctatccattttgcttatacaaccacaccgttaggtcttttaggtccaagaatacaagagaatggcaaagcacgttgtttacatccacacatactgtgtaaattcaggtaattttttttaatcctatgatcctcaattacctcacctgtaaaataggtactactcatactgcagaactcttgttggaattaaataaatgagtgtattaaaaatgctcaacaagatttggcacaaaatcggtactcagtaaatgctaatcattattccctttctcttcaaagctccacaattctgtattcatatcaccctctttatatcatttgcaaaaatgtatcctattccaactctttccacctagcctcaacatttacaaacactcctggtgggaagggaaagcttttgaggagagcacatctatactcatttacttctcagggatgcaagctgccctgcttactgagggcatatgttcatagtcacaccggagcccactgtccccttatactctcaaatgggcagtagcaaatcatcttgatcggtagtaatgacctgtctctaaattttcacatgcatcagataatttcttttttagtaagtgttatcttacatatatgccaaaatatcaccattatatggaacactagctgaaagaaaaattattcagtagtcttaattttctagctaacataaattctctccattttcatcatccatttagattaaagactttactgttagctgaatattcagagactttattctgatttttaaaatttatgaggttcataatgttaagacttcaagggtgagctgtttgtgtcatttataatgcgtgactagacagtaactagaaaatggattgttgactttacaagatttctccccaccacgtccccccaaacctgtgctgctgtgtatttggcctgaaatctttacttctagtcaatctttggacctaaagcctaccagcttttagcatcctttaagattgacgtgtctctgggagaccaatagatgctaaaccaaatttcgtatgcacttggcaatataggataataacaaccatactccctgcaattgtttcctaacacagatgtaacaaattaccacaagctgggtggcttaatagacatttattctctcacaaatctggaagctaggtgtccaaaatcaaggtcaattatccctctgaaggctctggggaagaattcttccttgcctcttccagcttctggtagccccaggtgttccttgatttcaagcagcacaagttcaacatctgctcctgacctcacataaccctcttctttgtgtgtctttctgtgtccactcttttctttattattattattattattattattattattattatactttaagttttagggtacatgtgcacaatgtgcaggttagttacatatgtatgcatgtgccatgctggtgtgctgcacccattagctcatcatttagcattaggtatatctcctaatgctatccctccccccctccccccaccccacaacagtccccagagtgtgatgttcccattcctgtgtccatgtgttctcattgttcaattcccacctgtgagtgagagtatgcagtgtttggttttttgttcttgcgatagtttactgagaatgatgatttccaatttcatccatgtctctacaaagaacatgaactcatcatttttttatggctgcatagtattccatggtgtatatgtgccacattttcttaatccagtctatcattgttggacatttgggttggttccaagtctttgctattgtgaatagtgccgcaaaaggacaccagtctttggatttagagcccaccctaaattcatggtgatgtcattttgaaattcttaactaattacatcttcaaagaccctatttccaaatctggtgacattcaaggtttcagggacatgtgactattcaggggaaactattcatcccaccacatcccccttgaaaattctggaaaatgtagtaataaaggcttctgataaattagtgtggaaagtattcacggttataaattactaaaaagtctcactgtgagctcttaatcaaaaggccctataaaacatttatttgcttgattaaaactacacatccgatattttggttttggatttattattatttttagacttggaataactattttatgtgaaatagattccataactgaagcagcatacctctcaatttcccaacatttattttattattttttgtcttcacactacttaataactgaggaaaaatcatttagaccaaagttcaccttggttgacaccatccagacagctacaggaaataacaatggaaactaaatctctaagaaaaagagtctttcatgtgaaatattgcagagttgattctagatatatagctgttggaagaatggatactattacatagatatggcagagtggtatccagcacctttcaacaaagatctttcagagtcagtcttattatgtctggagaatttacccagggcttaggtgcttttactgacaatctaaccacctgcaccccacccaccgtctaaagctaaagtttattggaagacttaggaaatcagtcttcggaatgtttctgagactggtacacccaccacttcattaaagtgcttcacttcacttcattagacaagaagtaaaatacttgtcaggaaattatttatagtaccatgtatatgggtatcttatttaatactacttaatgatggtactacaagttatataaaatggagaaataagtcatcaagtttgacaataatgatatttgatattatcattatcttttttattcgttcccacagaagtactctgttattggtttagaaaaatgatatttgatataataaagaaggaaaaggtggtaatattctttattttttgtatctttataccccagctctttcaccaatctcccccatctctgtagttctcctctggtgtccccaggcagtgaactattcccagtggttagggaacatctcattgagtaagttacatcaacatttcttcacatttcaggacaacaggaacagtgccaaatcctagcccattgttcaactctcaagccttattatcctaataacacatccatcccaagaaagaattcatcaagatcagagaggaatacgtataattttttatagtacagtatttaaaatgaaacagcttttggcccgcgtggtctcagtgggctcaagggggaaattcaggatgctagctcatctcacaccaagtttaataaagggtgtcctataaaaagctaatttcttgctggtaaattgctttttaagtaatccttgctgttgcaagagacccattcatagcgctgacactgggagccatgttggaaaggctagatatgctctgggagataaggtaagatccaggtggaatcttctctttacagaatgacaatgtatatagctaatattgtcctttgaggctagtttgcatgcagttgctggtatggcactgctcagcagcctgctgcagataagaatgagtgatgatgccctagattttaatggaacttttagagtgcatgcagcagtggggtgcagtcttcagcaaagaaaaacgagctgacttgcaggcatgagagatcatcaagaaagataaagaaataggacatccactctaggttaggcaaggctttttagaggatattatggaaatgagcaagaaccaatttaatttttataatgccactccatttaactttaaaatacaaggtcaaggtactgtgtttttcataatgattaaagatttggagcactctttctgttgaaacatactgcatctgtttggcagaaaaaaaaagtgacaaagaataaaactgggatcagagaacaacaaaaacatattctgtcacttgcctaacacaagttaaaaagcaaaggaaaaagagacaactctgatggacatgttcatccttatcccaacagaaggatttatttacctaaggtcctattatttcaagttactttgatcccaggatggtaacataaaatgtacattttaaaataaaatggaagtataagatcaataaaaaccacatatctgtggataaaacagcagattcaatcttgtggctgaaagtttgctttaacccaacatttggtaaactattcactctgtaatttattaaaagacatactgttattataaaactatctcagtttgcatcttgttggttctgtcaaaatttcatcctgctaattctcaacttgtaatatctctgatatacatgattaatctattttaggaataaaacaaaaactacctttatcttacgcatttctaggaagtgtttttagatgtaaagtaggggtaattgtagtatagtggaaaggattttgaacttgaagccagaacatatgtctctgccaaaaactaggtgtgtgaccttaaataagttacttagcttcctgaatcttagtttgtttagcttttttctataaagtggcacacctatccacatcacagttttgttgtcaaaattaaataaaatactatattagaaagaaacttttagaaagaaatttataaactgaaatgtactatacaagtttaaatcattctcattattttcttaccctaaaattttgaccttatttttcttagcaaatggctgaatctgtaaaatttaacccccacgcagcatctggattcaagagaactacggtcatttctttatacagaatactaattatacacatatagcaaaacacaagttttttccaactactctgtgtttttaaagattcagtgtgggcagaaggaattttatcaactatgttaggggaaaaaagtctgaagaaatgaaaataatgagaaaaagcactgttgatttaagtgcaggaacataaaacttcaaggcaaatgtgaggccaactgagttcatatatatcctcacaaaatgatttagttaatttaaaaacttttctaataagcaacacaggtaatcccaaattctatcttttatagctctaagagtccccataatttattcagcaattatttaccacccacttattataagaaaagccctgggataagtcttgagaagaaactaacaaaaacaaaacttgattgtttgctctcaaaaagctgggtctaaaataggcaaggtaagattttgttttgaggagcccgtattttccagcactgtccattgtaacattaaaatagtttgccaaaatcctcactctgtgggtgtatttgcctagggtgctaaaattgcttaaaaactttgttatttggctaactaaaatcactgaatagtaaacagtagcattagagatggcagagacattaggtgtcatgcagttcaactgcttcacctagcagacaaagacattaagttccatttcttaaatttaactatctggttgaggatacacagtagcagagctaaatcaagaacctcttggggttagagtttttgtttatgcattactttgttttggaattaaaaacagtgcctgtttgctaagttaaattgaaaatatgctctgaaggagaaaaacagctataaaaatagacttaacttccaaactatggatcacaataaactaaagaaataatttctgtagcaataaactccaacactttccataggaccagaaaggcttgagaaagaggagaacaaaaaaatgctttggggcttaccatatatatggagaaagctaaatgaataaaccagttgaaagacagcgagttatactagtaacaatattactgatatcggagctctcacttataaattgtatattatgatcatagtgactaggtactttatatctgctttctcattccttcctcacattaattcacatgtaggacagattacctcttctgtttctatccagaggcctagagctcaggccctcatcgaagacagacagagctatcatccttattctaaaaaaaaactaagaccccagacatagctgtgctacttatagactagaatgtgagagaaaaagacaagctttcatcatgggcttaacaaactgaaacacttcttcaattttgagattgagaaacttagctaatgctaggtgtaaagatgatatgctaccttcataaccttggtgaggagaaattagcatttctctcagtcctagaaggaggatgaccatgaaggtcttcattctcttgagaagataatcaaatgcttcactgccctgttaacggtttactcaatattcaccaagaaaagtagatgggattatttttgcagacacttatacgggtaatttattctgataagcagagacatacctttagtgcataaattgttccctttgtgctctttgtaataaacatcaccatagagaacaaacacgaagtaatgacattgaattaaaagacaccatagaggcaacagcgactggaatttgtgaaagtaaaaggatagtgcaaacagttgtgcgttgcattctgctctgaagattaacaagctgggtcaggctttgaccatcatgatgagcaggagatttttctaatggaaatccccaatcaagttcctgctgcacccagaaaggaacggcttacagaaatcttacatttctttgcacataccaaattgcttggcatattctatcacaaggtttactttccagggaatgtgatcaagaaatcatgatcctaattcctagttaaccctcaaagtttctcagaacagtcagtgcatcactgtcaacttttgtgcaatgtggaaatcagaattggtcacacgtttttccggccactgttttagattcatataatattagtgaaatcatgtcagactggtatagccatgaatttatacttcatgaataggcactcaataaatagtggattaaatcgaccgatttgatttttacctccaataatttcaaaaatatcattgaagacaaggttgttgaagctgtcacttttcttgctgaacctttgttgtgccaggaggaacagatggtaaaatcaaaagtgattagagaatcagtggggtgggggtgagattggaggggagaggtcttcccagtgagacccgctagcgtcttccctgagcagtatgttaacccaagacaattttagaaatctgtgcccctaagttgcttgacatccaaagcacacttgatgcatcctacatttctaaatatttttattgttgtttctcggtagtaatcatctggtttagtcactctaaaagtcaaggatgaaattttaaaatgcaaataaaagtgcctactttctctctttccaattcctttttgttttattgaggtataatttacatgcacaaaaaaatcgcctttttaaagtgtacagtttgatgagttttgacaaacatatgcagtcctacaaccacgtccgtgatcagaataggaaatatttttatcacttcaaaaagtttccttgtactcccgttgcagtcagtctcctgccccaccccagcccctggaaaccactgataggtaaaagcacttttaatctgaaaggtatttaatgtatggcagtgtcagtggtaataataacaagatttattcattggttcactgtatttttgagcacttatatgtgcccgttgtatgcaacccattatgctcaacccctgccctcctcaccagggataaactagtggcagagatagacaaagaagccgtctctctatcacccctatcttatagaacattcttcaatgttagaaatgcagtataatgtggccattgagaacttgaaatgtgcttagtgggaatgaagaactgaagttttaactttatttaatttcaattaatttaaatttatatagccacatgtggctaatgactatcccactggaaagtacagcttctatacaatatgataatatgatacattataacgcaggagtttaaccaagtgctaaagctttactatcaccagggtcactggtgttatgtgaaaagaaaacttacaatagaaaaataaatcctttaaatagtcacagacctgagaaagtttccttctcaagggaacacacattggctcattcaaaggaggttaaaaactagcatttaaggtaatttcatgaagctttcctttggatttctcatgcttattgtatacataaataggcaattttcgatgggacctaataaatcactgttttttatttgaacattttaacaaaattatcaaacagcattgcatttatgttcaacctatttgttctgagaaagacaacgattaagtagaagtcatcaaagttaccagaacaatttttgttcttatgttttagaaggcattgaaggtgtttaaaatgtacacttatagagtcagagtactatgcaactgtggcccttatagtttatccgtcatgcatctaaagccattgttacatctgtttctaattgtgcatggattgtccaagatacacaattggaaattccattttatttatcaatttgaagaggtttcacccatgtggtcactatgatcactatggagtcacattaaattgagaagtctccagaagttgcagtatttatttaaaattctaactttcttcagaggaacaaattctccatttctggattctgaatcctcattagccataaggttgttgtaagaatttgcagctaataggaacacatcctggggagagaccagttgaaaagtaacttggttctgagtgaaattatacagagacagtttctacttcaggtggtgttgctaatgaagctatcatggtaattttagcccatatgatccctaaacgacttcagaaccacttttcatccactaagaacccacttcaaccactgccacgttcactaccacagtataatatggaacaccctctggaattcagtaagtaacttcttaactcattggctatagagctttgcctttgtaaattctttccttttgcagtaaaagagattgtttcaaagtaatccaattagtccctaggcatgtctagaaaggtagagtcaacaacagtaaggtaatagtccttataagatatgtaagaaattatcagtcatttactttaaaataatttgtacacttttccttttatatggttcttctatgttgaagccagtggtcatccagtgattaagattagccaaactcaaaaggctaaaactaaattcaaatggtattattttgctttaattttatgcaatgctatgtatttaaatttcatgaaagtttcgtatggcattgctatcaatttcagtcaggataaatttcccgtgaaataatccacaattttcaactgtacgttgggtacaggtaaggaaacacccttaagagcttatccagttattagctggtattataaatttcaagtaattcaatgttcaattaataaacagttactttaaatgggaaagtatgagtcaagagttagtacaaaggagaatcttaaaagatgaacatcaaagaatcttactattgatttgttggtgcctttgcttgcacttctccaaattgacttgacgttttaaatttgtactgataatcatcagagtcaaatctgcttttaggcaaaaagtatccgctagttattcccctactatgaaagtgatgagatgaattgatcatgtctccagtgtatggatggatgtctttgaggaagacctactgaccttatgtttatcttctgtcagcatggtgtgactatgtggagagacagtgctatttgctaaatactttgtttttcaaataaaaagatttcacagattatgcattgtagaatttataagtattcttttatgtctttgaatgtgccaatacaatttttatgaagttggaactattttatctattttaatgaaattgtaagccttctgtgaattcttttattaattttattctgaagaaaatctgaccaggttagggaaatcaggtcaggttacgacgtgatcccagtggaaaagctgaactgtggactgtgatttaaaatagggaagaggtactgaagtgttgtttttatttttgtttacaaatcagcctttctaactattatgtactcccatccttctatctttttctccaccagaacgtattaacaggcatgcatataattaatgcttttcttgagataatattaaaattaacttcatctgtcaggccgtctgggctaaaagtacacagtcagatctgggtaacatttgagttgatgtaaatatgcccacacatactgacaatgcttaccatttattgtgtgaatgaaaagcagtgtaaatattgtttgttctactagggaagctccacattttaatcaaactttgaccgtatttctaaaatgccagagcatctggaattgttaaaggaactgatagtttttgtgtttttaactgttaggatacttgaaatccaaagggtaaagaaactcagctgatttatacgtttcttcctctttattttaatgtgataaaatgtagtttttgtcatgggctgacaaacagtggtagactacactaactctgcgtttgctgggtttaatcttaccctctcaaggcatggaatgggagctcacttcagacccagccatgcttcactgtccactgccttctcatggatatagtgtgaacattaattagatgaattccataaagtgctttaagctctttggagaaagatactcgctgcataattattcttaactcccatacgctcttatgatataaaccattctgccaggaaatcctttttagggattatcacttaaaatgaaattttcattattaaaagcaggaagaatatacatctactgacagacgaaaatgtgcttaaggcgactgcttttaaataggcagaaatcctgaactatggagccatccatgcctgaaaatactgagtaataatgaaaactggtagcaaatttggaatattaatcatcacattaagttgcaaagaaaaaaaaatacaagccacatgccctttaaaaatacgtgcacaaatctttattctagaaatatataactttaggcctaaaaaagtacaaaaagtaaattattttatggctctgaaagtatccttaatttactcaggtgacaacaattagtgtttaaagagttagttttcaatcttagctacaagttggaattactctggaagctctaaaaaaacaaaaaacaaaaaaaaatagagatgcctagttcccacctgcagaaattctgatttgatttttctggtgcgagacctgagaataggaatttttttaaagcttccctagtgattctagtgtgccacctaggttgccttaaggtaaacctcatattatgcagaacctagcaatcacctatcctgattttatagacgaagatcataagacccaagagggcaaattgatttattcaagattgaatatacaaatgatagaagattcacataagatgcagtatacagagtggcttgtggattcttgccaatgcaggcagcagaattttctttagggttcacccagttcaggcacctctttgcagcagcacttgactaaggttcttctgattggatcattatatgggcaaaaagaaaaagcttaattgaaaagagctgaacccacattgtggaatggaagatatacagtttacacgttataaatgattaatattcatgaaagcatactgccctttcctcttcccttcccatagatgacatcattgcattggtgtagttaggttggtggtttcttgttgttgatcttggttctgacacagttcatcacttattatcctggcttattatctacttctacattcattgttcactcactcactaattaattcaacatggtttttattgttttggaccggttatatgcctgcaacgctacgtaaggctgaggatattacaatgaacaggaaacaaccctgaagtttaaggtatcaagcctttgagttactgtcttttatcatagctgatataaaattgaagccccactttttttgttttcaattactgaaaattcagtgctaaaaaaatgtggatttttattcaactagataaagtactacaattaggtttccactgaccttggctgtttttgttcccagttgccattacataaatctgtgccactcacaacttaggaagggtgtaacattctctgtaatagtttgcctttcgaatagtgtttggattcattactgtccctcgcagtttggaataatgaccactgaataatcagtgtttggagactaaattagtgctgcaaaattccctcaaattacctactgttcttttccctgtcgatgtatcctcatattcactatgattaccctgagaagaaagatattgttgagaaccactttacctactcgaagttttggtatttcaaagattcatacttatgtcatgttgattacattagcactaatactattggcagaattctaattcacgttattttctttttttccaatttctctccatgcctatgtgttgtcccttcgcagctataaagccatggccgattcatgggtgcttttgttaaggcgttcagcagtcacgtttgtagatttttgaatgggacttagagcccttttttgttctttatgtatttctctatttctcagcaaaggaaatgcagacatgcaagaaatagtgatcaaatgtcctgtgtactattgtgggtgtcattaatggtatagggagaaatagaaaatagttgcaaagatgcatttaacaaataaacgaggtcttgagattcaccatgaatgtggccccttctatgaaaagtagttaacatccaactgcaaagttgtactggatcagtttgactttaacctttagctaatatgaaaatatggaattgtgtggtggtgctcacaaaaaagaaaactcatttttcttaattatcatcaattaacatgtactgactacccatgagggaaagttaatttgctcttgagtggaaccagttatttgccctattatttctcccttgcttattcccctctccctccctcctccctttccattcaacaaagaaaaatagataaagcaatttctgattagccagtgaaagcctctaacataaaatttccaaagatgtgccataaattatccacaaaatgtaaaacttttcaattttggtttgcattttcttttttcttattataaaggtaataagtgctcattatagaatttgaaaaatataggaagttgcacggaagacgaataaaatcagccataatcctacaaacctattgacacttgtacatatgtttgttatctctaatgcattcattatgataatgcatcttttcaaccaatagagtaatcactggtgactttcaaatttgcctactcatttttcactctgtggacttactttactacctcttgccctttttcagtaaatgaataaatatttaagtaagtaaatacaaatgtaataacttatgcgctcaagcacacagatacacacagagagaatttggaacttcggaaatgccatcctctccctagggccgcaagtgagttgataagcacgtaaggaaggataatcaggggagccttctcgtattgcccagatggctcaaaattcgtcatctctaccaaacaactatttggagctttgaagaaatatccatgacccctttgaattcttcagtttctttcgcgttcactttgagaaccaagtgacaagtgaatttcctgacttggtcttttaaacctgttagcgcagttccattgagattttgtgggcacaagattgcaatgaagagatcaacagggagaaattcatttccctatatatgtgcgattaatccggagtgctaagggcagatataaagcaggtgcctactcctgtataacttggaataaaaccatttccaaaggctgatgatcctcaagtcttgttctgcaaatgactgatgtataacttcaggccaatttttctccagttagtctgtgtcactgggagtcccatttctcggggagcagccccatgctttgtcaggtgcggagcccacagaaggttaatgcgaaaagaaggcctcttgccagactgttttccagatgatacgtagggttattagtttgagctccttaagaagatttttctcacctgtcctaccaacttatgtttatttcattggtgttagagggtttcagtggcggaagtaaaatatttagcggggaagggacagcgttcatgggaattttgcctaacttaattttgtatctttagctcattcgtagtcattgtactttgtgttttgtcaactgaattttgtttgcatacaaaggcacaaaatgtttgcttcagacctgtcactcttatttttagcatggttagacaaaaactgagatgctttaattgtctaacttatcccagtttaagtgctgcaaaatctcccaggcaatgtcatgggcaactaagggataaaatcagagatttaaaggtgccaggtttcccacgcttctaacagttggcgttttgggtgtatacaatccctcagctttcttctttagtttatggagtcttgtggagggaatagcaggtttttagctaaaattatcatgctgtcgagttgggtctctagtgcatcctgaagagcttgcattatttacagaggctgggctatcattttaaatcctgatgcttcaatgcccgttatcattcttgacaaactcttccagcccgtggtctgttttcctctgtttgcttccatttactttcctgagcaaccagctgagcaaagatttacataacttttgtttaaacaaaccctgtacagttcactctttcagccagtatgtaaacacttttgagacacagttacatttttctattttagtcccagattctgtttatttgctacattttttgtgcccacatttttgtctttgttaagtctcttacagattcacatgaaaaaccagaaaccgtggctgctcaaaagtcattaataatgagatttttagctactgtttctgcttgtaaattcttcatttcacataatacagtctcaaaaggccacagagaattcagcctcgcttatctctgtgttgcagatgatggcttctagccttacccaatcccagtgcagcttgcttgccatccaggagtcgaatttgtttccatctgacattagcgtattaaaaagattggagatcaacaagcaacaatgttcttgtagaaaggtaatcaaggtttagagcctgtgtgtcatgagactcctagcatttgaaaccgctaaggggttgaccaccattgtcccaagcacctgtttaagattctttcctatgataagggacctaaagtgattagcatactgataagattttcctagaataacctatttatttcagtattattctttcaaatcttaattaccatcttttcctttacccagggtcttctttctacctctacgacacatttaattacctatattccccaacctgtaccatattaaattttgaatggaagttttatagggtaatttattggaaggatggccttgagtgtcattatgttcaatgaatgccctattttgacaaagagatgactaaatgttattgaaatctttttaatccaccacgcttctgcttagatgtaaatgcaaatctgttctttacatttgtgattgaattgaacttgaaaagtaccgccatattgattccttctgcaaataaaatataattacatttccctaaactttctacactctcccaagagattggctggctttgtattgtagatttttggtgatcacagaggacaatgcattatcataagaccaataagatttatttttaccttggtaaagaattttaatttatttctagtttcattttcatttatatccatctcttctcaccctctgctctacaaaagtatatatgactatataaattgaaaaaaatatcaagtgcaaaattacagaaataaataattaggttattttagtggaggaaggtttgttgtgggtggaggaggagaggagtgagccaagaaaaacgagggaccatacgtgatcatatttttgcagctattttaaattgtttgtgtatatactttaaaatattataaaataaaattttaagtgcaatgcatatttggagccaatgatgagggataacttcagaaacgtagcatcatcatctagtgctttcatagtcctttcaacatttccagatagttttaatggcctgctcatggaggcaatgccctaattttaacatatctcttcacaactctgatttcttgcttcctaacattaaatgtcttcaaagcttctttcaccactaattccttatcaagaggataagccagtttattctttaagaaaaactagctacacaaaaccgtaagtcattccaacataaatccttcactatcctctctctatagatttggttttgattcctcctgctgaaattcaaccttctttcttcagctatccacacgtcttaccctctaacttccctcaggagtgtctattagctcccattacagtgaccacagtaatatagtaatcccctgctgttctcactctccacttccttacactgcgttttaagtctcttcatattctttatcaccttgtatcatgcatcggttttcttagttgtttattttatgttgccttcataaattccatgagagctcactgccgtatctttagaacatggaacagtgcttggaacataatgggcattccttaaatagctgtagaataaactttcaaaatcaacaataatgtatttgccaaatccattggcttctctgccattttatcttgttcaataccactgcgatattccccttcctttttttttttttttaaagtctgtaaccctttagcttctgtaatattcctagttttttattcctctcatgtgtcaaaatcatcagttgaggcttattgttttctctttctcactctgacctcacctttgtttacatctcatcttctggctttggctatcctgttttttatctctgttccaacctgtatttctagccctactacctggacatgacatgtggatatctccgtatgaccgcagtttccatatgactttgcaaattcatccctgctctcccctccaaagtcatccccacaattgacttcctgttccttccaacctattaaggttcaaacccacttttgctcctcctttgcaggctacacttttccttctcagtacctcttttttttccaagttcttagataaaagtcatagtaccttacgttgtaattgccactggtctggtctttctgcctgctttcctttccatttgtaatcacattatccattccaatccatttataatactgtgatcagccataaaaataacatttatcatatcgtttgtctccttaaaacctgtagtagatcccctctatttacaagatctggtataaaatcacccttcctgatattcaatgcctgttttaatataatctcaatattatgcgtcataaatccccctgtgttcttgcactttttatttcttatacatctcatcaaccatgtcttatcaactctcaaaacctgtattggttttcaggaaaactcataaattattcttttgtagaccttttgtttgtcatctttgaagatctctctctgaactacaatattttgtctgtataatcaatttggaaattcatcaggtattgaaatatgacatgtcttctattgtcttgaacattaattaaaactttatttgactttttatatgcttacatcttgtttcctcacggagtgttaacctactagaaagtaatagtttaatcttatatttattttaattcagatttagtagcatactttacacgtggtaggatgtgtaactgccttacaccttgcttacgtgagttattaatgttttcgtatatttaatctgaggatgtactagcaatgttaaaactgtaccgcatgaaattgagtaattgaactatttgttttaaatgtgttgcttaacttattgtaccattttctcataatcacagctcaagttaactttgtggttgtacgtattatttcttgtgaaatgccaacaaacttagagcaaggaaaataacaggtataatcatactataaaggcaaccttaacactagcatagtctcttagctcatatggtaactacaataatgtacagtgacaaagagaatattgtactttcttagcacacactttcctactactctactgttgtggataaaaacagacatactttaggagaaactatgttatttccaaataatgccttaaaggttactccaggaaaaggcatttacataaactatctaggaaaagaaccttttaaataatataaagagctcacccaaaaggactgaagtgtttagttgaaaaaaagtaaaaatgtcgaagactttgaaaaatagtttcttgcagtatattttcatcgcttccacttacgttatgaagacattaagcgctagtttatcaaaaactatttttgtacatgtcttctaatgacagaacaatgtcaacatgattttcatcattgagaatgcgtaaagaaaccctttgtacagttttttctatgaatgttcccctaagattaaagcaaatttccaacacgaattaggcactccgaaaggaggaggggagggaggggagcaagtgctgcaaaacttcctgttgggtactatgttcactatctgggtgatggaatcaacagaagcccaaacctcagcatcacgcagtatacccttgtaacaaaccaacacatgtacccctgagtctacattaaaaatagagattaaaaaaaggaaatcagtatataatctaataaatacctctcaagctttctcatttttaaaataaaattttagattattattttaggaataaaataggctcttcattgtatataagttcatttctgagttgcaaaaatcctctctttatgtttttttccccgtattagcatgtttttctcctgtttttccccactcaacttggctgccacaatcagaaagcacaaagacaattttttcttgcgcttgtaaatcaaaaccttagcatcagacaaaataactgctccaggtctgtcaaatagattcatttgagctttcttcatgcattgaatacggcagaatttctgacctgaagaaatctagccttttccaaatttgctttaagaacattttgcaataaatttaatataataaaaggaaaaaacacatcaggctagaatttggaaccgattgttattaaaaatctcaagtctatcaatttaacttcaacaaattacttaatttctgtgatggttaatttcatgtgtcaacttggctgggccgcagggtaccgagacatttggtcaaacattattctgggtgtgtttatgaggctgtttctggagagattcacatttgaatcagtagagggagcaaagccgattgttctcccttgtgtgggtgggtctgatccaatcaattgaggacctaagtccaatcgattgaagacctaatcaaaaagcctgattaaaaggaactcctgcctgatagctaaagctggaacacccatcttttcctgcctttgagcttgaattgaaaccttgggtcttcttgagtcttaagcctccagttctggggctggaacttaacgtcattggctttcttggttctcatgcctttggactcagacaggaactacatcattggctttcctgggtctccagcttgctgactgtaaatcttgggacttctccagattcgtaatgagccaatttattacaataagtctctccctctctggtttcgagagagagagagagagagacagagagagaaatgagagcacaagaacgtgagtgtgagagtgccctaatataatttctctaaatatcactggttactcttcaaagttataaaattggtataaaaggtgacctcaatttttcatggagttaatgtatgaaagtcacaattaaaaaggaagaattagttctggtgtcctgaaagttatttgaataaattaatatgctatggaggctttaaaatactatgaaaatttaatattgtattattcttagtgttgctatttttaaatagcactttttcttttcctttttttttttttttttttttttttttgagatggagtctcactctgttgcccaggctggagtgcagtggcatgatctcggctcactgcaagctccactgcccgggttcacgccattctcctgcctcagcctcccaagtagctgggactacaggcggccgccaccacgtccgggtaattttttgtatttttttagtagagacggagtttcaccgtgttagccaggttgttctcgatctcctgacctcatgatccacccaccttggcctcccaaagtgctgggattacaggcatgagccaccatgcccggcttaaatagcactttttcttgtgagtcactttttaaatatttgtgcaaaccttgttgccattctactcaagctaatatcctaaaccgaggacattataacatttcaggagtcaaaacttcagacacttaacatagtatcctcaggttcatccatgttgtcataaatgacaggattttattcttttatatgactcaataatatcccattgcatatatatgcaatattttctttattcatccattattaaacacttaagttgattctatatcttggctattgtgaataatgctgcaataaacatgggaatgcagatatctctatgacatactgattttatttgctttgtctctgtccccagtagtggaattgctgtatcgtatggtagttctatttttaagttttcgaggaacctccataccgtcctccataatggatgtactcatttacattcccaccaacagtgcataagggttcccttttctccatattcttgccaacactttttatcttttgtattttgataatagccattctaactggaatgagatgatatctcattgtggttttgatttgcattttcctgatagtgatgttgaacattttttcatatgttgtattaactaagccaaacacagaaagacaaatgcagcttgttctcattcatatgcacaatctaaaaacatcgatctcatagaagcagtaaatggacggtggtcaccaaagaatgggggaagtaggggaaaagcgagaatggggagaggattgtcaatgggtacaaagtcacgattagaaaggaagaattagttctggtgtcctgttgcatagtatggagactattgtcaacagtaaggtattgcgtatctcaaaacggctagaagagagggttttgaaggtttctaccccaaataaatggtaaatgtttgaggtgatatgctaattttcttgatttgatcaagtaaaggtcttaattgtttggcaattaagactcatgaatacaaataaaggtcttaattatttggcaaagcatgctgagttttgtaaacaattcagtagtgatttttgagaataggtcaatagcaaatattaattaaaatgtcttctatttatgacctacagctagatggtaaacagatagatgatagatagataactgatagataactaatagatgacagataaatgataaatagataaatatagataatcgagagagaatacctttcccttcacacacgtgcatataggcacactccatttctatcatagttaccaggattcagacattttgtctcactatttttctcaatgtgaacatgcatataggaatattatagtttttgttctgtgcccattttagttcgttttttaatatttcaggacaaaggcaatatggcggtttcactttgtttttcatttttgcttatactttttaaagctcagtgtagaaaagtttgaaaatacacaaaagtattaaattaagacagctgggcacagtggctcacgcctgtaatcccagcacttcgggaggccaaggtgggtggatcacgaggtcaagagatcgacaccatcctggccaacatggtgaatcccgtctctactaaaaatacaaaaattagctgagcatggtggtgtgtgcctgtagtcccagctactcgggaggctgaggcaggagaatcgcttgaacccgggaggcagaggttgcagtgagccgggatcacaccactgtattccagcctggtgacagagcgagactctgtctcagaaaaaaaacaaaacaaacaaacaaaaaagcacctatagtctttctcccataggttgccttcttaatgggttttacaccttttgatgttttcttgagttctgtcccattagcaagtagtattgtacaaaaaaaattttatcatcttttatttaatattttattgatgtttaataattagaattattttaaattttatatgtcattttaaaatgcaatacaatatagtaaactcccagatgtgattgtaaataattaattattctcccattattgggcattgggactgcttccacattttggtcactgcagtgaacatccttgtacatgaatctgtatgttgaagttgatttcattccacactccccttcattcaaggggctccaaccattctcgttttctttcagcttctttatatccaggcatataaagttccttcctgactcgggagcgtcatacatgctgttttctccatctggataagtagttaattctgttcttctttgtgcatctcccgtttcagtaacttcatctccaaagcctttccaggtcactttatctaaagttacaccataatcttgcaaatcctcaactattgagcattattagtctccgttatcattattctccattattctctgtgaaagcatcccgtgattttcttttgtccctattaccacaatatgtgtttattccgtgtatgtacatctttgtttgtttattgtttgtctatacctgcaatgaaatgcctaaggtcaggaactgtctgatgcaggatgcaatgcgctcaataaatatttactgaacaaattaattcatttgctcagtcttgcaggcaaatggtacttctgtatatttaaatatctaaaatgaaagcgttactcgttactgttggttgtcaatcaaaatttaaatgtcgatgtttaagcgtgaaagacctctgtcaagttaatctgtacttacccaaaggctattatgtagaagcgacataaatattttcctaaatgttgattttcatattttaagaagacaatgaatgtttcaaagcattttcttctacacagctatttattctggagagtggggcatatgtttcttaatattgttaaaattggcaaggggatactgttgctatatacaaagaacacctaatcatcatgcagacgttttgtttctggctctcagttatgaaaagcagagattttaaaaagttacctttatatgctaaattaggaatggcagaaggtaatattctaatgtttataagtggttcttctctgagtccttggtttctatgtttatgaattctctttttgaaagaaattatagttattattaccaggtctattcttttacattgtttctaattctatggtgatcttcaaaatagagtatcaattttaaatacttgggaatgaaattattcttcccatatcatttctttgtatggcatacattgtgatttgttgtcccatcattgtttcagtatgacctgttactgcaaaaacatattgagataaatcatcccacatactctcggccaggacagacatcacactgttgcagcaacacttcagatgagccccattcaaccttgtgtttttatagagaaggatgccacatgtttatattcatttctgaagattggctcatattatttattgaaacatactagtttaaaaatctgtccatttatataacacctggtctatctacataacttgaattacataaatataaaactaaacttcccctcttctccagtgtatagcttgcaagcaagtgcatgtgaaataaattaaagccttgtttgtgtttttttcatcatgtgagtacaagacttttcaataaaaatgaattacttttgaacatatttgtttggacaacaaacaagagaaaagatctatttgattgatagtggacagaattttcattaagttcaacagcagaaataccacaattgcatcattcaccttcgtgtatcaaaagaaaacagaaaattagatgtgatgaactctacacaaatgttcactatgcatactttacccattaaatacattatcaagaatcatgtcagcatgacattctaatatagcagctttacaaaaacatgtaatctaatctagggatgctgttgtcctctttaaatcagcttcaaacatattctgggttgatatttctcattcttttttgatccacattgtttattcacataatgattatatttaactgaagataacagcattatcaaagtgaaagacaaaatagatgtttaataggaaagtgagtatcgaatcatcttttttctaccaaaaacatctataattatgaagtatttggttaattattttcacaataatttaaaagtgtacaacttgccgatttttttgtactttctacttttcatgtctcgcatatatctctttaatatctaagtatttgagtcagaaaagagccagtaccgaataatgggaatctcactgaaatgtgataacaatctggggcctggtcctgggacctttatctgcaggacaacttggacaaatatttagacccccaattcctcgtctttaccctaggaataataacacatttttctgacctcatacttcacgtggatctcaaatggaacaatcatctgatagcactttatgaagtatatgaaagcaataaattatcacaataagataattgcaattattctttggcatagtattagtgatgtctttatctgtctgacaaaatcaacatttctgtatggtaactgcctttccttgttttaacagaagatcatgccagaaaagatgagtaggtagatacttaacttgttgttcctgaatctggaatgtattgcagatgtcccagactgatctttgttcttttttttccttacaaatttcttttcacattgacagtgtgatatttctttaaatgtgcaatacatagctaaccttatttgtttgtgtttactaattaaaatatctaaactgcttaaaggagaaaattcagttttaagttttattgatttatacccttcttcaatccacataggattagggtagtatgtaacaaaatttcaaactataaatgaaatattgagttttgtattaaggccaaggatgaggaaaaaaaaagtaagtatatatggaaaaagaatggtattgaatgggagttttgatggagcatgttgacatcatgataatacctattatctttatattctgaatgtcagaacaaaattagagcaattttcccttatttccctacaatacgtctgtcttaataattctaagctttcctgatttcagtagtaatctgtattttgcaaaaggcagcatgtttataagatatcaagtaaactaagtttatggaacttgtaacagcatttttaacaacatttctccctagatagttcatggtagacatgaatttattcaaaactagtatgtagaaaaataccattaacaaaagctctgaaattatattagaggagctgaataatgttacttgagaaagaataaaatgttatttatgatttttggtatcttttacccactatatatggccatatctctgaaaaactttagtaatatgtactaatgcaaatatggtagtaaattatgtctacaggtgctgataccatagtagataaagtatgataactttattttaaaatatcatatttaaataattaatatacagtactgggaaagactattttatctattctctcactcttgaataaaaaaatccagaaaaaaataccttgttttggtaagattatatcaatttatttcccaaatgggtagagggttatttttttctgatcataaacgtatgtctcttcattataaaaatccactaaaagtgatagaagaaaaccaaaagaataaatgtaaacaatgatgccattttccaaaaatcaccttcgacatttttctggatattgatacagtctaaatctcttttcggaagactccctcctgtgtaggttccccaactactctgcaatcttatttcctcttgttctgttcttgtagaaaggagacccattgtcaccatgtcaaataacacaaaatggtgcacgtataagatcattgtctctgtccattatttgccagaggacctcaaactttttcaggtggtgggcaactggatgtcatgctgctccttgtacaacagaacacaattcattatttatatggttatttcattttaagaaaatttaactttcattagctggaaaaaaaaagaagtggtttttaagttgtttagaaatgtgaaattcaattttcatactgcaaaagagattcaactgcaaacacaggcacacatgtctggtgtaagaacgagttgtcatacaaacccaaattagctgcctccacgttgtctttgttaacaagtgtttgtttgctccttgttccatcattcagaaatgctctttagcaggaattgatggaacacagtcgcagtgacctcttcctgtctttaaaaatcgagatgacatttgcccatctgcagtgttaacatagttcctcaaagaccactgacagtggggtaggactgtattgcgcaagttctctcatttccctagaatataattggtccagggccagagattttagctcatttagagcagcaaggtgctcttttaaaattccctcacctattttgggcttcatttcccttatacggttatgccttttccagtctgatgaacattctccttgacagagcagacaagcaaaaggagctgcacactgctgctttctgtgtcgtctctatccctaaccttctcccttctgccccaatcagtgaaccttcgtctttctggttcttcttcctccaaatggaagtaaaaaggccctgaatgttgtctttaccattatcacgagcctcaattcattccaagctcagcttttcctcactgtttatacagttctatattgttcttctaatatttgccctcagttctctgtccctcgtttcttcccatgttcatactctattagaatctgagcacctttgaggttgtccatacagtggcacacatctttgttttatactcactgggatgatttgccattatattgtcaaaattttattctaaagagcttttacaggctttcttgagccattttctcttgaaattcaagatcgttgaatctctacgctttttccttcttaatctaataaacatacacccccacatacacacgtgtgttcctgaaagacagatgccacttgactcgtcttatagattgtctaaattgatcattgtgtgtggggataaaagggtgaattgtataatatccctgatggttcacgaagtctgttcctgtataacctgattagtcttctgaactcttttaaattctgtctgcaaatgactgaggtttggcaatcagcctatttcagttagttgttttcttgcataagaagggtccatatgtactgtgtgaagtaagagagagaaagtacttagatttgctggatgccctgattgttagcatggctaaggtattgtgtaagtaaggagagcagttaaaaatgatattgtttttatttcttaattgaggtaaaattttatataagatgaaacagacttatttgggagaggaggaagagtttgttcttacataacatttcaacctgtcatatttagttgagaacttcaatctgtcaagatactttgtataatattcagattctgccatctaatatattttccacgctttcttactgggtgtgacagtaacttatactgtggcaggtgtataagttagtaaagatattaaatgctcaatctgttaacttttgtgaagtggtcccactgataaagtgacacctcaataaaataaaaatttccattacctcagaaagctttttcatgctaccttccagtcaattcccagccccaataggcacctattcttctgatttatatcaccatagattagttttgtctttttaaaaatttgtataaatgaaatcatacaaaatgtactattttgatcagcatactacttttgagattcatccatgtaagtgtatcagctgttcattcctttattgatgattaatattctattgtatagatataccacaatttatttatctattctccttttgatggacattcaggtggttttcagtttttggctgttatgaataagatgctgtggacatttgtgtacaagccatttgtgagcatatgttttcatttagtttgagtaactctgtagaagtggaatggctgggtgaaatgtttaaatttatgagatattgtcaaacagcacctaaacagttttctaaagtggttgtgccattttgcaatgccaccagtgatgatggagagttccagttactctacatctttgtcaatatttggtcttgtcagtcattttaatttttgctatcttacagaatatgtaggtatattgttgtggttttaacttatattcctctgattactagcactattaagcatcttttcatggatttattggacattcatatagattatgtgtgttgaagattattacctttatgattattgggtgaaaatagtatcattttgaggtcattcatataacttgaagactgggaatgacagacattttcctgttttgtttcttttctttttactttatctgaagagtctactagaatgcagtgttgctgcctgagcagcagggcattagctttgtaaaagctctgttccttggcaaccccaccactaatatgaagtgcagaacatttgaattgtctttgaccagcttcagcatcagcactattttttttttttgctagacccctagtaggtatttaaaagtacagaaatagaatttaatcatgctttttaccaaatgtgctatgctcttagagattctttcaacgtgcataaaaattctgcagtttcaccacataccagtaaaagaaactcagtcactcatttagccatttagtaaaaagaacaaattaactgatgagcatagtggagacctcaaaggtaaagaagacaatgtccctgaaataaagacaatcataaattttcaatcaaaataatgaaatttaggctgggcatggtggctcatgcctatgatcctagcactttggaaggctaaggtgggaggattgtttgaggccaggagttcaagaccagcctcagcaaaaaagtgagaccctgtctccacaaaaaaattttaaaaattatctgggtgtggtggtatgcaccggtggtctcagctactcaagaggctgaggtggaggatcaccagagctcaggggttggagactacagtgagctatgattgtaccactgcactcaaacttgcatgacagaatgagtccttgtctctaataataacaaaatttaatttttatagactgtgaaaaaccattatgtagatacagttcaagtacagtatgattttataggatagataacttttgcttgaaaatgtattcccaatttataggatagataacttttgcttgaaaatgtattcacaatagagttagtatttggggcacacctttatccatttaacaaacatgttttgagcactgccaggtagcaacacgttactaggcactagagtgagaaaagattacagttcctgctctcatggatctcatggtctagtcaactggaatgaaaggattacataagtagaggtaaagacacacatgatggaggatggagaatagtcaaaggtctggagaatgaccaggacgtcactgtgagttgtctaattgcactgaagcatggatgaagaattggaaagtcattgtaagaagcctaaaaaggtatctctcagggatgctatgaggttctgaatgttatgtacgctatttgggcttcaacaggcaggcactgagtattcagtataaatttttgagcagggaatccaccagaagaactatgcatctggaggattaatctggaaagattgtgtagaatgttatgcagtgaaagagtctgagatgaaacagttaggagggtgtattaataacataggtgaagtgtaatgaataaccaggctggaggaaaagcaataacgatggaatcaaccgggcaagaagtataacaattaggatcagtaaaatagaatttggattggaggaatgaaaaaaaaagggacaaaacaaagttgaactgctggtatccatactggaaaatacagatgtcattcaaataaataatgtaatgaatataagaaaccagttttaggagtgaagtggatgttggcttgaaaatatttcctttgaggtttcagtcaaatgaaaaggtcctgaaatgctacgtggtagcctaagaaggaagcgttcctagagagaaaaaaattagaaaagatttacatttgataatttaatcttttccttcatacaagctaaattgataagaaagtaaaacctatagttttcaccactcttttacaaatatccctaaccttttagatattcacatgaataattgagaaaaatctaacagatgacttgcttatgtcatttgtctgctttatccttaggttcctctggcttatatattgttcaataaaatacagatcattgatattgtacaatgtactgataatggggagtgaatccatgcttgtgcattcttttttttttttttttttgatttgcagagggcgtgcccagtcaacaagagaggcacaattgtttttatcatcacctcttctcatctaattccatgaaggagagtagtattaccatacaacagataatgagttggaaaacaagaaacctaacctcagaacttaaggcttggggaaaaataaaagagtaatttgtgtttaatgcctgtataacttggcaagagggacatataaggcttagtgatgcccaacatgtgcttagatgtggattgttagttgatgtcttgggggttctgtaatctaagctaaatgctcaaaatcaattaattgatgttagacacagagatctgctttgatccctctttatcgtatttctaggccttcccattctcaagagcctgagaaacgacagctttccttaataacttgttatttgtggtaggagatgaaactttgataaaaacacaattatttttaaatgtctctttttcactctaggctgttgtatgtatttcaaaaagttacttttgaccctttccagaatgagaaagcaatcaagaagattataatatcttgcttagttttctgctcaatttatcaacaaatatttcttaagcaattattaagctgagcagtgctcagcgctgtacttggtgatataggaaatggggaaaagactgtctttaaggcctttataatagtaattacctcaacttgtctgtttcttttccttaccatttcgccaaattcattgatctatcttgttctcaaagcaatcgccatagttatattgtaacacagcattttctagggtgtccccattaagttgagagtgttgacaagaaaatacaagcttatttatcattgtaaaacttgagacacctagtagttaccctaaattaaatatttgttggagtcagtcacactaaagagaacacttactgcattgaacaatttacctacattagacagcatttaaagactatgccacagcaaaggcccatggaattcttgtgaacacagaatagaagtgtattaaggaacaagcttaattctgttctcttaaagcacaacactttctcaaaacatattttgaaatcacctttgaccattttttttaactaataggtgggtgggagttagggtaggaaaacacaagcagcttcatcaaaacgatattctattttcttcaaatttgtggggaatcatacggcctctcaattttctacattatgctaattatgatattaatctctctgccagcaaatgaaaataatacatattagatgtagcaaatgtcaataatgacaaaattagtcatcatgcagatactcagggattcccaaaatatgtttggattatgattgctagctttgagtttgcccagaatcgtttcaataaaaataagggactcaaacacatttggagcaaaactcacatcataaattttagacatagctctgccaataatgctctcagttatattttcagtcctaatatttcctctgagttccagaccagtatcttcaactgtctgattgatactctctccttcatttctgtctccaatgcattaagtcctgtgtatttactttccaaatgccacttggttccatgcacttctctccatttctgccactgactcctcctcaatccaagcgaccatctttcctcactttaactaccatgatatctcctgcttggtctccttacttctattcccgggctcctccaatccattcatcctccagcagagaatgatgactagcaccttccacagtgtctggctaataggaggtatccaatcaataattgacttacagagtgaaaatataggcatggcaaataccagtagagaactacagggttttagaaccaatgacattagatacttccatcaaatatttacagtgtataatcaagttgacttgcacattgtcttatttttgaaaaacaattttgttggctttttctatatgcacacatacatattgtatcaccctctacccgccaaatggcttttgaagaagtatttatgtggctccaaattgataatacctctagagagaagagaaattagaaattttaaaatgacctatgcttcctttcgaatatcacgtcctgagacagtgttttttgagttacgtgcaatatgttccacgatgaaacatttaatgtgttcagaggcatgctagtaatcatgtagaaagaattttatgcctgaagtcacatgttctataaccaggatcacttaataagaaaacaagtacagctgtggacaagatgcctttttatcagggaaaggccaatttgttttctttgcaaatctaagtaaatggagagaaaaacacagcccttaaatgttttctatttgtcctgaagttctcatgaatgagttagaaggcgagaaggattaaataaatccttgaacgtagagagagctaacatttattttagcaaactaaaacctattcgctttgcaaagttctgttctgtactttgtaacaacagttttctttaaaacaagagccaccaattcaaatgcctttacagaatgattgaatgctttcatgccccacctaaaggcattcaaatcattaatcaaacaaagttctaacgccaaaacatgtctgggaccagatttaaaatgtagccctcagtttcagagggcaaaaacttaacatatttatattttcctcactttaggtaacactgtattgaatctctgcttgaaattgaggagcacgtgattttttctttttggcccagggcagcatttcttggaagagaaagaaaaacaacccaagatacccttacaaaacatgtagtacttaaagctctttatgatgaattaattttggtatacacattaatagcagtgataataacaaatctatatatatatatataattgatatgaataagataaatacatcaaaaggaaatttcattacaatttgatattaggtaaatgtcccattaaaataaattgctactgtacataattttccttcagttcattggcaggatgtttgctttggaaaataaacagtctatttctagttttagaaggaattctcattattcttttatagcaaccattatcaggagcagatgggaaattgtaccaagagcatatctactattatacctcacaggaaaaagagagtattaaatgaaatctaacaaggcctgctcctgactctagttcctgtaacaaatgaacacacacatttgtatggtttcagcatttgtattagtaaggtacaataaatgtttactgaaattgaaaaaaaaaaagataacaggagaaagaagaggctaaaaaggtgcattttatttctgatcgttcattgtaaagactgctcctttttaaaataatcaaattttattttatatacagagggtacatgtacaggcttgtcacaggggaatagcgcatgatgctgaggtttggggtacagatctcatcacccaaacagtgagcatagtacctacctgatgagtagtttttcaaccaatgcgcaccctccctccttcccacatctactagtccgcggtatctgttgttcgcatatttacgtccatatatgctctatgtttagctcccacttataagtgagaacatatagtgtttgtttttcctgttcctgcgttaatttgcttatgattatggcctccaactgcatccgtgcttccgcaaaggacatgatttcattctttttatgactatgtagtatttcatggtgtatatgtaccacattttctttatccaatctaccattgtttcacaactagatggattccatgtctttgctattgtgaatagcacaagacaggacctttttatttgactgagttccttgcaaattactaataaaagatctggaggtccttagttaaaagttgaatctgtagtgccgttcaaatttagagatgtattttctgttcaagagaagaaagccctcattcggtcatgcttaatattcagctgtaaagtccaaaacatatgagaatgacacaaatggaaacattttataaatacctatacaaaggaggggcacttagttcccctaggcctcttaaaagtcctctagaaagagggtacttttatgctaactattaaagatgagtaacgaatttgtcctatacaacttaacagtatcgtcaaggaagtagaaagttactcagttttactgggcattggagctaagcttgaaagtgaggaggagaagcggcaggagacggagccgagaaggcagtggggagaagaggaggatggtcctttccatgctccctgttgtactaacatgtttggatattatcttatacttcatatatggactggattcttgtccttctcattctgagctctccttgaccttgattcttacctcctataactttcattctttctttactcaaaaaaaggccatttatttcagccatttttcactgttttcttatccttcctagttgcttttctatactatttttccactcttttttttttctatactattttgcccttctctccattttcctaactgctagatttccccaattttagccatctttcaattgttctgactatcctcaggtgctcccacaaggttatcagaccttccaccaagacggaatccctcagtctatggacaggctaagttgaatgggtcctggtgctgtgcttagcatatgccttgagtatttgtgcatttattttgcttctttacaaaaatccatcatccgatagaagttgaaagaaacttgctgaagcacattaaaatctctgaaaacagtattggctatattttctaataattagcatgactggttaacttgctttatttatcattgaaaaaagtatcagaaactgtatatcaaactcctgaattcttggcactgacgaagagacacaatgagaatgaccttaggataaaaaaacaagataaagcaccatatttgtaggaaattgcaccataaaagtctgtttcacaactctcccaaatttcattttattacatcttttctcttgaccaatcagtaaactcggttaatgatttacctgtctcaaaataattcatgaacaaaattacaagtaaatctcagtattggattcttgaaacatctccttgttcaatgaagtttcctttttcttccctctatttccctgtatttatcttttcttccagttgcattttatctcttctgtttttttatcttgctccctagtttgtgattttttgccaattttttatttcctacataattcatccaatctgtcattgtacaatttcttataactgcttcttagcttattccttttcttcatttgtcacattctatttttcatctattgtgttttcatgcagttttggaaagttttacaaatagacttttaaaaaaatgtacgtaatgttttcatagaaaaggtagtggtttctttttcttatatccttccctgtataaaaataaaaatgtagcagttctttctttgcctatgtttcctctttccttcccccaatttgaccagacttgaaggacttagatatgtaacagtgttattttctataatttaggaacagcttttgacttaaaaagcagaagagaagttgaaaataatatagtaattctacatgtccttcctgcttcccaactctctgcacatgtttgtaacctcccctttcttttttagtgtatctctttcatatacctttgtccccagaaattctgattcagtagacttagaatggaattctgggcttttatattttgaaaagctccccacgggagttagatatgcacttcttattaagaatgaatgcttaatattggaatcaaaacacaataagctttctaactatgatgaataatccaacagatttaattatgattttctttttgtccagaaccaagactagatgttaattgccagagaaatagataagaatgcctatgacagcagtacattaatatgatatcaaagcttggaaattttattggtaatgaataattcagtacttaaaatatttagaagctatagaattaaaattaattaatgttgttcactgtgtgaataaagttgattgagattttacatttaattttgtaaacccagtgttatcttttccagctcagaaaacaccacatacaagctactactttctgttttgatcccttatttttctttcttatgctttatcactgaaaactctccttgagcaggccatgcactgtaaatatttctcctggttgcaaaaccttctcatacaaatgcagtagactgtgtaatgagctcttctttcacaaaattaaaaaaacctgaaagccctgatttgcgattctatacaaatgagatttagatctaacaattttaaattattgcttcactcttagctgttcaattctatctcttatttgggaaaccgaaataataaaaccattgctgattccacaattaggttgtaaaagtcaccgtagccatcagccatgaagcaaaagtgccaagatcaaaactacaaagcaaagaggctgagataaaaatgctgcagcattagtttatagcattataagcagcaataagaattccttgattgcttaacaaagactcaaaaggcatttactccattaccttacaactcaaagaggtattcctggaccagcagtattggcatttttttgaagtttgtaggaaatgcagaattttggtgcctccacggacctaatgcagcagaacttgcagtttagtaagatctccaggagatttgtatgcgcattaaagtctaggaagcaccgctatggtatacatctgatgtgtgcccatgcattttttaaaagtatgaagtaatagttgtaagtattggacactcttgaaggaacaaataagagccatggtctttactctctaaatacctccctgacatctatgttttaggcaaaatttttttcccatttcagtagtcactgatgcttgcacgatgcagtttattccaaaacaatggtgattctcatgtaatagttcatgttgccttaataatttacgttgcctcaagttctctgcccaggccccaatatacaccgagggctgtactcctcccctaacgcctgctctcatacagtggcatagagcccagttttatgctcttggtcacatcatggagattgcacaccacaggctttaacttctgccgtactctcactgcctctaaccctccatatgcctaagttctacgattctttaaattccaaattgacccagaagtctcctccgctcatccttttcactgagatcatccctcttctggcctaccatttgttgatcaccttgctttttttttatcctactgtatgtagtataacaaattatcacttgcaactgtgtcttattttttcaactagattatgtactgcctaagacctagaaaattgtgcttatttatttgaatctctaggaggatcagtaatgggtattaatactaatgactccatggtgatgatgagcctgaacttcctcccttcctttctttctacctctctcctttcctcccttcttttcttcctccattccttcctctcttcctccctccgcttcttccccacttcccttattcatagattcatgcgttcactcagcaaatgcttactgaaaccttccatgcatcagacattgtactaaacaataggaaactatcatgaataagacacaatatctgacctcaaagaatttatgatataaaagtaatggcataaaccgtgattacttttgcaccaacctaatatatagacacagtttgttatgactggtgtctctattactaagcaatgactgtcacatgcaacgctgatctgaacaggtggtaaagagtgagatgtaagcaatggagcaaagccaactagttacaaggaaatatcacatgtttactagagcacatctcatgggcattcaagagagtatggccaggacagcttgtgaatagttcagtaactgtgcatagttttatattcattgtgaggcaccgtgtcaccggtttgctgatttacagagtattttaattgctaactgtatgctaccaaaatttccagtattcgaaaataattttgcttgaatgtagaaaaagaaaaaagccaagaaatgtatgtgaaacgagagtctaagggagctttacctcagtctcagaaaacatgcattccttccttcatttaggaagcatgtactggggtctactgtcagcttgctattgtgtcaaggagtaggagaatacaaaaatattagagaatatgaatcacatctattaggagagttttctacatacgcacattattctgtcagtgacataaggatttgagtcattcagatttaaatacggtaggtacctcaagttctcagatattatttcattttctaaggttcgtatttagttaatatgttattttaatggccttacaaattctagattatcttttttaaaaagttaaatagaacgtaattgccatttttatttaatggtaaaaagcatttttgtttttgtgtgtacttggttgtaatattctccttttcaattgagctatttttctgatactttactcttaaaatttcattcaggaaaaaagtaaacaatatttaagcttgacaatcataaaaatgctctggtgactatagattattttaaaatttattactgtagcttagggatatcttgatgggatgctcctgaaagcaattaattctcagttttttgtggcttctaatgcaaaatacattgacgcagacagaatttgaaatgaattttcttctaatatagcaattaattttatttaaatatctctagagtttttttttaatactgtgactaacctatgtttgttctttttcacctctcgtatccacgatcactaagaaacccaaatactttgttcatgtttaaattttacaacatttcatagactattaaacatggaacatccttgtggggacaagaaatcgaatttgctcttgaaaaggtttccaactaattgatttgtaggacattataacatcctctagctgacaagcttacaaaaataaaaactggagctaaccgagagggtgcttttttccctgacacataaaaggtgtctttctgtcttgtatcctttggatatgggcatgtcagtttcatagggaaattttcacatggagcttttgtatttctttctttgccagtacaactgcatgtggtagcacactgtttaatcttttctcaaataaaaagacatggggcttcatttttgttttgcctttttggtatcttacag

SEQ ID NO: 959 - DNA, 50 bp, Homo sapiens
  source 1..50: mol_type = genomic DNA
gtaagtctttgatttgttttttcgaaattgtatttatcttcagcacatct

SEQ ID NO: 960 - DNA, 250 bp, Homo sapiens
  source 1..250: mol_type = genomic DNA
tgacaagcttacaaaaataaaaactggagctaaccgagagggtgcttttttccctgacacataaaaggtgtctttctgtcttgtatcctttggatatgggcatgtcagtttcatagggaaattttcacatggagcttttgtatttctttctttgccagtacaactgcatgtggtagcacactgtttaatcttttctcaaataaaaagacatggggcttcatttttgttttgcctttttggtatcttacag

SEQ ID NO: 961 - DNA, 51 bp, Homo sapiens
  source 1..51: mol_type = genomic DNA
gtatttctttctttgccagtacaactgcatgtggtagcacactgtttaatc

SEQ ID NO: 962 - DNA, 41 bp, Homo sapiens
  source 1..41: mol_type = genomic DNA
cttttctcaaataaaaagacatggggcttcatttttgtttt

SEQ ID NO: 963 - DNA, 60 bp, Homo sapiens
  source 1..60: mol_type = genomic DNA
tttttgttttgcctttttggtatcttacaggaactccaggatggcattgggcagcggcaa

SEQ ID NO: 964 - DNA, 53 bp, Homo sapiens
  source 1..53: mol_type = genomic DNA
aaactgttgtcagaacattgaatgcaactggggaagaaataattcagcaatcc

SEQ ID NO: 965 - DNA, 67 bp, Homo sapiens
  source 1..67: mol_type = genomic DNA
gggaagaaataattcagcaatcctcaaaaacagatgccagtattctacaggaaaaattgggaagcct

SEQ ID NO: 966 - DNA, 60 bp, Homo sapiens
  source 1..60: mol_type = genomic DNA
ctgcaaacagctgtcagacagaaaaaagaggtagggcgacagatctaataggaatgaaaa

SEQ ID NO: 967 - DNA, 36111 bp, Homo sapiens
  source 1..36111: mol_type = genomic DNA
gtagggcgacagatctaataggaatgaaaacattttagcagactttttaagctttctttagaagaatatttcatgagagattataagcagggtgaaaggcactaacattaaagaacctatcaaccattaatcaacagcagtaaagaaattttttatttctttttttcatatactaaaatatatacttgtggctagttagtggttttctgctattttaaacttgaagtttgctttaaaaatcacccatgattgcttaaaggtgaatatcttcaatatattttaacttcaacaagctgaatctcagttgtttttcaagaagattttagaaagcaattataaatgattgttttgtaggaaagacagatctttgcttagttttaaaaatagctatgaatatgactatgaagctaaaaaaagtgatagtgtcacttacctctagtttcaccacatttgtgaatacattcttgaaggggaacttgagccaaagaggtacaagtttaatggggaaaacaaaacctcaaaaaggttactgtcaaattcaatcatcatttaaatttcccttggaatgtattgaaggcacagaaagccaaatgcgtgctgctgcagttggaaagcctagagagtttataaatgggattttgtattatgcttccagttgttgatgttaatgtgtcttgtttcgtaaaggaagacttggcctttatttaccaaatgagactattgttatgaacaatgaaaacttcgttcttttgccaagctcttgcatcccacccatcatccacataataggtggattttaatattcaggaagctagaacaactcattgatgaatatctttcgttaagatgtattaaaaagaagattttggaattatgtcagttgtctttgcccacctcctctttccctctttattcatgttacattattcagaaagtagatacaattcatattttgtacaaaataaacacattagttgacctaaacacacacacacacacacacacacacacacacacacacacacacacacacacacacaccccttgccaaagttaaagaattatagcctcatcaaaagatattttgaataattaagtcttggttttgaaaatcttcttgattatagatagataaaataaagaactaaactttgtagttaaactacttccttaggtaagtcatatacttttttcccagattgaaattcttctcttaatcatacaagtattttattatttagataactgatgtgcttatactatgaacaggtataaacctgtataatgtcatttctgaactaggctcaatctaatccaaattaagatggtaagaaatgagaaaattaaaaaaattgaataccatactataaatatatatatacggagagaattcataaagtggattaaatcgactggaagattatttttctataatatataaagtattgtttcctattttaaatgtcttactcatatagtatttgaatagagtgtattaacattccctctgataactctaattcacctgaattttcaaaatcttgttatctgttattgggctctaaaggcacattataatttataaacaaagatgtagcaatatgcctgtttcaccaaataagctctaaaattttagatctttctaattttataagaaagtggtatatgctgactctgttgtgaaatagtatacaaattttaagttaattacagctagggatttggctgtaattaggaaaaaaattttcccatttaaacatgttgacctacattaaatattgcacttcagtgctttaaaaagtcaagttcagcttccttgagttttttttttaagctgagcttttaaagttgtctatttcacgctacattttaaaaataaatgttaacatatttaaatttccactgagaccacttttgtggcatacttcctcaggatttttatatcacttaaattttatgaaatgtaaaaatgtaataaaatataagtactggttctaccaatatactcatagctatttctaagcatccagtagcaaatcaagtaaaaattaataaaataatattttatgaataatatgttaacctaacaattaattatagaagggctgtaatcacgaacctattgctaatcaatagtgtactctcagtgcaacgcaagcagatgttagaagggaatagaagttatttattgcaccggtgaaaaatatataagatgcctattcaacttaacaacagtagtcttcgtttgtaatggactttaagtacagcggttagaaatatttaacattttttagtccagggacatcaatgaaagaaagtgtataaattcaagctagatgtctatatggagccctgtagttgcaaaactttaagtcttctgaaattttaagatattagaaataggaaaaaaaatctcaaaagttcaaataatagtggacatccaagaaggttagtctatgttggaagcaaatgaagtgtgaaatgtagtcagttagcgatgcagtttaagatagacaattcactacagcttcaattatgtaacagaagaactggatacatctataggcttaagcatgataataatgagtttaatgatggcgtagccaccaaaactgtctttgtacacgaaggaggtgcaaataaaaacctatcatcggctgtaaggggaagtcataggttgatacaaagcaagcctgtgtacaagtctttaagcaagcgtccatgaatagcaaggggcgccatgctcttcactggagaagaaaattacctatttgtctttactaacctctaactgaaattaagcattccttttcattttgaaagtaggcaaaaaaatcacagtagtacaatcagtacctatgaagtcacagatatgtacacatctcattacagttataataaatatatcaaaatatcatttatgcttatcactacttcaaaactgcagtacttattatatgtgctacagggtcttattgttgggctttaaaacattattctgaggaatgtcaggcttcaacagattgccaaagaagtccaaggcataaaaaaatgatcctagccagctgtctgtttatctgcccagaatctcatcctaatttactatggtttcagtcattttaatgtgcagtcactatcttcatacactccttttcttctggagtattctaggagaagacataccagtcgaggggttctggggagccaggccttcaagcaatggattgctgacaacataatgaagaggattttacttagaataatgtcagttgataaaagtttgaatgggagacggaagcaaggcagtgggaagtggaattcctaaattgaggaacctctgaatcataatccttagcaataataattaagatttcaaaacattataattctttcttcttttagacaagtctgatattgcttatcccatatcacagataaggcaattattctactaatatgcattaaggaatagtggttttaatttaagtgttaccttaatgaaaataattttgaattttttccttccccaagtctttttgtgaaaaatttcaaacatatagaaaaattgaaacaattgcaaaacatatgcccatttacactgttttcctccccctaaattcttagagtcaacaattgttaacattttgccatatatgctttttttctctcgctttctctaccctctttctgtatctctcatatatagggcatcacacacacacacacacacacacacacacactttttaacatttttgcaaataagttataaataccattatattttacccctaaataattcagcatgtgtcgctttgaaatacagacatgccatatataaccatgcctgtttattatgctctcctccaaattaaatataatactgcattattgttaatatccattccatattcatatttccttaatagttcaaaaatgtcttttatattttgcaggggagttagtaccaatatcttatcatggctcatgcattacatttggttattattatttttcatccttcttagtctaaaatagcccttccacatttttttcaccgatattgaaatttgaaaatgtccaggacgctagcctcaaaaaatgtctcatctttcaggatttgttttattttttttcccctgatgggatgatttaacttgttctgtagtctctgaatttctagtaaactggaagttaggtctaaataagacttcaagagatgcatgtcaaacatgtttggcgagaatacttcatatgagatgctgtgtattttgtattacgtcacatcaggaggtgcatcatatgaagtagtctcactaaatgctgcaaagttttattacttgcttcaggtggtgactgacagatcttgcattataatgtcacattttttcttcgcaattaataaatcatctaatggctttagtatccattgatgatccttccctaactcagttattacactggggcttgcaaaatggaggttttcctaatctgacatgatcttaacatttaccagctggctttcttctgtttgaaaaaaaaaaaaaaaaaaggtttttcctctatatttatgtcaaaatggactcataaatttttatttattcaatatattattatgaattacagttattattcttgcccagagcttcctgctcaattgtcccaggctcaccttggactttgcctatcccagatttagaattacccatttttttcaaggaactctggttacttttagaggtgaatagtacgtagaaacgtacatctgggtagtagccccttctcaatggaatgtgtgcacctttctggcaagcagtcccaaaggagataatattttcagattaccttggaaatgattcttgacaaatctctttcagaatacatggaagttaaaagtaagtctagacatgttaaaaagcccttcttgtgtgagacttcatgtacggtcattaagttactactcctttaaacctctctacttctgaattcttaaaccaaaatgtactagtatataatctatgctggtttgccatgcaaattaatggtgtaaataagataatgggaggcattcgtaaatgtacttaaaggaagaaattattgtttaaagaccttagctcattgtttgcatgcaaatacacgctgttgattagaaatgagccttatctaattcattaaagtaggcctggttggtcctcttcttgaaagtctccattagcaattcatattgctctatgcgcttccttgtaagacaactgttgtctcttaagttttctttaactttggcttcttacaaattcagaccccacccccaaccaaatagctttcaaccaaatagcttttcagcatcttatttcctacaaattaaaagcgaatattttaatgactcaaatggctctttacagtgtgtgcaatatgttaaatgtacccagtatatccgtgtgaaccagtgctacaagcctgctcacacattcacattttgcccccaggatctgtcccgtccgcttgctctgtactcaaacttcctttttttctcattgccagtttagaccttgactctccatccagcccagagtttggaaactgagtacccacaggctgaatcctgaatgcatgcagtatttttgcatagccactgtttttaaataattgacaacttttaaaaattgagagacctcattttttaaaaaaatatggatttctgtcttcttttgaaaatttagatctggctactaggcactcattactatattttctcttggcaccatcacctacaactgagtaacagatgtttcattttcttgctactcaaagtgtggtctctggtccagagcacagacatcacctgggagttgctaagaaatgcagaatctaataaataacagtcagcatttttaataagatttccaagtttccaagtgattcatgggcacattaaagtttgagaagcattgcctggggtaagcaagctttgtcctcagtttgcagcacctgtcccactttgctcatttatattaattgcttttccatagatatttgattttatagtacctcatgcagacctttgtatgatgatgacggttagggtggtgatggaagtgatggtgataacacttaatattgccatgcactgttccaagtgttttacgtagctcaatacttataacaactctatgaaatagttgctattctccttttaattttacaggagggcaacgaaggcacagactgataaaactctttgcccaagattgcacagccagcaagtatttgaaccaggatgcagtcccgcagtctgcctccggagtccttactctagatcagattttgcattatttatcccagttttgtccatcaggattctctggtatacacttgcaatttcttcctaccaaccttctccttacctttgatggccacacgtagtagcaaaagaattgaacatagaatctgttctgacctatctttccaaccctgtttttcataatttccactatttctgtttatgtctgaagctttgaatgacctgaagttttctgttcttcagcttttgcaaaaaaaaaaaaacaaagaacaaaaaacaagacaaaaaaaaaaaaaaaccgcttcctttggttgaattctctttccccttattttttttcccaaaatcttacacatcccttaagactcatcttaactgctattacctcaatgaattgtgacctgctcttctcaaacataagcagtttattctcttaaggttttcttgcccctttttataacactcatgtaatattgtatgtatatatcatgtatcatacctatttacatatgcttttcccccagcaagattaaaagcttcatgagggcagaggactctcttattgttatctctataacccacagtacttaccagaaagcctgatatattgtagatggccagtaagtactttcttaatttaaatcgtaagaattttattcacattcagattaaactgaagatttaaatctttacacttgacattattatatagattaaaaatagatctaaagagccagaccaatttttctgtttttatcatgttatcacatttccatggatacgtttgcaattctagaaattgaccttgatcccttctagtcttaaaaaaatggaaggagtttggttaataatattttaggtattcttcagaatttagtacatttaagagacaagtaacttcaatttatttagctagttatggcaaaaagcagctctttgattcaaacattttgtacatttgtttatcctactctcactgtatctcaactaataccttttaagtgaattaagcaggaattagccctgaaactgaatgttttagcctcatcctacatatagccacaagatgttttagatgcaatccatatcaccaaagagctatttttagattgatcagagagaatcatacagatattattattcacaggtgtcaatggaaaagctggtctcttcccatctgttctctgatgactcttgaaaagctttcaagggcattcataattcttcatcaaaagactatgaaaaatcagcttcatagttaattgttttatgtcatattttattttttcaacttggctagttctagtgaaacagactagctggcaccaaatatgttgttgcattggctggtaatgatgataccactgtgtggagatatacaagtgaatgtactttatttgtggccttccatgaactttatgtgcctgggaaagtaggagttagggagagtttgttagggaacgtgatctctgggatgggtcttaaaggatgagaagaggcaaatgaagagtaaatggacatgccagagagaaaaagtgacaggagcaaaatcactgaagcaagaaaaaatggcctacattgaaggactatacacagttcagtataaaaaggctctgttaagcaagcaccattgacttaccctaaactcttcattttctacatataaactgcccaattcccactccaaacctattgatggatattagtaacctattgatgtttttgaaaggtgttcaagtatcctttctggtaccatgtaccttggctcccaccatttgagagtatgttctccaagaggcaacagtctgtggttcctgacctggctatgcaagttattcttattattaaaattgtcctatttaattaaatatcatgaaaactaatgaaatagaaatgaaaagataagagaattgtggtttctatgaatactaaattgaatgctttggaagacttgataaaggtgattagaaaaaaaaaaaaggccagatgcggtggctcacacctataatcccagcactttgggaggccgagatgggtggatcacctgaggtcaggatttcgagaccagcctggccaacatggcgaaaccacatcgctactaagaaaatacaaaacttagccagacgtgggcctgtagtcccagctacatgggagtctgaggtgggagagttgctcgaacccgggaggcggaggttgcagtgagacaagatcatgccattgcactccagcctgggtgacagagtgaggaaaaaaaaaaaaaaaaaaaaaaccacggtgctgttgaattagatgtaggtaagacaactgtttaagattgggtatgagggatagaatccccaaaaaatggaggtattttgcattgagattattttcagcatctccaaatctgactgtaattcaaagaaaccaaactaaaagtcacagattatgaaatgtagaagtgttttatgcaaaaagtaatatgcttaacttcaacctgtgggcttttactccaggaaaagtctcggaccccataccaaatgagaagtaaatgagtgaccacttgtatattctaagaaaaataaaatgtttgaagatgtgtaaacacatttatataatccctccaattttacaatatttttccaaaaaccgcctatccacttaccctaatcaagtttgataaggggacttccttttatatgtaggaaggctgaaaaatgacgccatgacaaatgaaattgtcaagatggaccaggtcatggaagatttgaaatctcaaagaattttttccagggtagaatataaggatgttgggacgtttttatatgctttagatttgcatcctcatatgtccctttgacagttgagctcagagtgaaaaaaagagagtgaaactagtggcagggtgactcaagttagagacaatgagtaagcagaatagaactttaaaaacctgacagattcaagaaatacttgatgaaagtggaacaatttagtcgttaagtagatgggatgatgaggggaatgaagggacaattctaggatgatcccttttccaggttttttgcttgggggaactggctgcatggaaggctgttagtcaggataggaaatacaaaggagagtaactgaatggaaagaggaaagcaaatcagacatacagagctcaacttgggatataatagtcttaaggagctcttggaacattgaaaataaggtgatcagaaaacacgcatttgaataggtaagtctgaacatcaggaggaagacaagggctgaagacactgagccattttgctgtcaatgtagagatggtggcaatctccattgaactaactgcttctcaataaggtacctttctcaagtcattaatttgctaaccagtaaacaaaccagaattcccagagtacacattaaccattaagcactgctgtggaaaaggagttcaggtgtcaggaagccaacgtggcagatgagcactagtggtgacaaatgaaccaaagtgatatgggtgatctttatggggccacagagtaccactgtaaactatcacaaatcagaagggttgacaaacaaaatattggggataaatcagggaaaacctaccacaacatacaggaaaataagttcaaagatttcatcctacagattgcagataagaaatgagccctttttatttggggcaccctagggaaagagtagatgcccatatgtatatttaaagtatgaatacagcatttatttgaatatactgcaaatggtcaatacaagggtagctacagagcccataacatgaaaaggaaacacaaagaaatacatgccccagtcagactccttacttgggttgctgtaaattctctctccctttaaggttattgcatttaaagtctatctgttgattggacccaacagcagctgcaccaagactgtaccatttttaaaaaaaaaaaaaaaaaaaaaaaacaggccaaatggcattctgcatttattttccttgttgctgaagaaacttgaattgtctaccctcaaagcctgtcctttgagacacattttataattagaaacacttatttacaaagttctttttatgttagaatcacaaatcataacactccaaaaaaggaatacactatcctcaggtgagtgtcctacctttgtttacaaaagaaaacccaaagtcctaagagaaaaatgtgttgatcattttattgattccttaccttggtttaatatagttaatggatgtcttagatatgtataataagtctattatcatgttccctttaaaattctcttttgttttactaattatatgttgtcatagtttgaccattaatataagtctaaatttattataatgtgattttttctacaaaggttaatttgaattaaaatattttattttatctctctctactatgataaatgtttttaaaaatcgtttgtaaaatgaaagtactatatttgtgtaagctgccaatctaacaatttatcatttaccattatgatggtgaatgtataacaatccttatattcagcagaaagccttatctctcatttcagaggaatcttgccccggttaattattctgtctcttgaatgcacacaaacacaagcatatctttaccctttttctgctgcctcactatccctgatcaggtgaatgtttttagctcctagattacaatataaatatattcagacattcctttccaaatgcattcattccactgtacttgtcagagttcatagctgtgaataacagaacccagtttttgttgatagaagcggaaacggactttaggagaaagatacagacctgttcccattcctaaacaaagggatagaaaaccagctcaaaatgggcagaactcaaaaaagaggctcagctccaagaactatagtccaaatcataccctagattggatctcgaactcttggactcaagcgatccactcatcttagcctcccacagtgctgggattacaggcatgtgccacgacgtctggcccccatacactagatgtaaacgttgccatgcaccactctaccactgcagacactgggtgaagaatgtcattgctactggaaagaattctagatagtgccttataattctgtcactcattccagattcaaaaactgaacttcccccatcagattccatttgtatttggggattttgttcgacataatcagggcattcagattctgggcaaccaaagttaacaaatgtctcttacttcccctttcttgttattattcccatttgaatcttcttcatagttagtcactgttacttaaacacacattctctattatcacatttccctctcctctcttttgctgtttgcttttgatccaaaccactgctcagaaaccattattgccaataacaacaatgatttcttgtagttaaatccactggacatatcttagtcctattatccgtaggccatgtgccattaactgaacactttccgtattagcacttggtcctatcttatcttccaagtcactaatcttatctgaatttattcttacctctctatgtaattccttactatattgatgacactccttgctttacctgccccttacatcctgatgtttctctaggacatgttctgaaccctcccttcttctcattctatacggtttccctgattgttatccatagcaacaaatgtagctttcactgtatcaattagaataatatctagggagattaaaaaagaattatagtaactgaaacaaagtagaaatatattcatcttcttgtagaaggaatctgccagtaggtagtccgaggttggtatcattgctctatgatgttgaagatccagatcccttctgtctcacagatctgccatcctttggtgaggtccttacactcatggatcaagatgactatcagctctctatctatcacaactgcttttcaaaggctgcaaggtgtaggaagtggacaaaaaagggatacctctacccttttaaagggacttcatggaagatctacacaacactttagcttgtatgtcattggccagaatttattctcatgacaatgccaaactgcaatgggcattcaaaatgtagtggaatggatcatgggctaagcagctaagcagtctctaccaaagtcaccgatttcattttatggcctaagtctaatatttggcccaatatatagtttcagattagacctacatatgtagcttcaaatggaccatttcctcttctatgtctcaaagccatctcaaagtcagtatatccaaaactcaacatgttatattcctctcccaaaatctactgtgggtgatatcactatctattcatgtacccaaactataaatttggaagttacaagagctagtattaatgacactaagttttgtgcatttactctatgaacaggactttgataagagttttacaaatgtttcccacttaattgtcgcaatatctcagttatagagattttatacgtccatcatctcacctgactcttcgagatcataagcaaagcatggcagcattcttatgtccattttacaaattaccacattaagcacaagaaaaaacaagatatatgtccaaggctaaccaaagttatagaaggatcgagaactaaaagtcagtgatttagacccagatctgtgccttttcccttattgttacatatgaccatatctagctatgtgaacaaagcagctaatagtgacgacagggtagaacaaataagaaagtgaatattccccactacatttatgattatttgccagtttaacagcttcaagcctgtgtcttctcagatatgtgcttcctcttatgtctaaggaaaagtactatatttgatatgcttttatgaactttcttttttgagatggggttctggctctgtcactcaggctggaatgcagtggcatgatcacagttcactgcagccttgatctcccaggttcaagcgatcctccaacctcagcctcctgagtagctgggaccacagacacgggctactacacccagctatttcttttttttttttttttttttggtagaggcaggatttcactgtgttgcccacctggtctcaaactcctgaggtcaagtgatccacccacctcagcctcccaaagtgcggggattacaggcatgagccaatgtgattggcctgaattttttaaatttaattttattgaggtaaaatatacctctatataaataaaagtaaatatacctttaccatttttaagtatacagttcagtggtaataagtaaatttatgttatttttcccctttgtcccctctccctactcctatttctgatctctggtaaccaccaaggtagtgtctactttcatgagatccatgtttttagctcccacatgtgagtgacaacacataatatttgtctttctgtgcctggtttaccttacttaaaataattacctccagttctatccacgttgctgcaaatgacaggatttcaccctttgtatggctgaataatatcccatggtgcatatatatatatcacattttctttatccattcatcctataaattttaaatggtgtggaatttggagaatacttaaggaaaaatgacgattgtgtaaaaggaaagtatctacaaaagcaaggtttatctaccccataaagataacaagagaatctgtgaatgtggatacggtttctggagtgtttcagaggttgaaagattgtgaagaactggatgggtataaaaaaaagtgaggaggagaagaaatgaaagttctggaatgttctgtaaattgtagatgagttccctatattaattttaaaatgtaaattgagattataattattttttgatgatctatttttgctgggctgattctctgttggtgtaactctttaacgaatatgggtcacgtgggaccctggattttattagaattacatgtgcgaatcaaattctaactttatgagccaatataatgattgtttttttaatgattagagtctatccatgacaaaaacagcttgtttctcctactgacttatttggtgttttcttgctaattagcctttatactaggcagtagtaaatcagagtacttggacttcaggttggccattacataaacctggcaactaaatgctgggtaataatcacctatcttcccacctgtgtttattacctttggaagtatgtaacatggtatctttgcgtttatatttttaatttgttcttttttctcttgcaccagctacttaaattatctgagcttccttttactaatccaaaaataaagataatagtacatatttatagagatgttgtaagagtaagaggtaatgtaaataaattggctagctctatgcccagcacatgagtaggtgcttagaagttagtgtctgggtacatgacttctggggatgataaagtgagtagctcgataaatctccccaagaatcagtaaaatgggacacactggagaaaacatcttatgaccctggatatcaaccaacggcatatgctaaattaaaaagtgattatttataaaaagtactaaactttgtatatgaacaatatgaatttgtggtgtatttgcctgtattgcccccagtccccactcccagcttggtcaagcataatagttctatcaaggtagaacaagccatggaaataagcagcttcatcaccacagggactgattttatttgaagcagaagtttaaaactccatgtccagaagcattgtcagtaacggtggagacctaggcggcaaacaaaaaggcagaatagcaactcagctggcctaaagttgcagtcttgattggaacaagtaactgactggcagactggccagaaatttaatttaaccagcatatctgcaaaatgaggcagccgtaataggcctcagtaaggactccttgtgtctccttcatgaaaacttaaaatgtgcctgcatgttgaatataccctttaacacatataaagaacctttagcaaaacttggaagtcttactggcttgaggtatttaagatcaactgctggccaactattgactaatgcaaattaagctatgcttacctctaggaaactaggcatacagtttgtttctgttgtttgacagagaaagaatatcaacagccacacactgtggggaaacagattccacagatttcatctaggcaagttattaaaacttcaatttaaaaaacgctgggcataagaaggaacatcagaatttggggctcctttaatatgttatttaaaatgtcaaattttcaagaaaaatttacgatacgttcaactgtgacccattctcatggggaaaagcagtcaacaaaagttgtctctgaattggcccaggtattggcagatagagacttaaaggctcctactataaataccttcaaacaactgaagaaaagcatgtttaaataattaaatgaaagtatggtaacaataactacaaatagagaatctcaactaaaagatacacactatataaaagaaccaaatgaaaattctagaattggaaagtagaataaccaaaatttaaaaaaatcactaatggggctcaagagcagatagtaagacagaaaaaaaaaaaaatcagtaaatttgaaaatagataaataaaaattatccaatctgaatgtcagaggtaaaacagtataaaaaacgaacatgagtcatagctttgtgtcaaaacattgagcatatcaatgtagatgttacaagagttccagaaaaaaagagaatgttgttaaagaggcagaaaaattatttgaagaaataatggccaaacacttcacaaatacggttaagctcaacaaaccccaaatagaataaacacgaagagatcaataccctaaaacataagagtcaaactattgaaatagtttcatttgaaattattgaaagacaaatgggaaagtctttaaaacaaccagaaaaaaatgactcctcatgtacagggatcacatgattgatagttaatttctcatcataaacaatagaggccagaggtattgaaatgacatattcagagttctcagagaacacaaaattgccaaccaagaattccgcataaaacaaaactatccttcaaaaatataggtaaaataaatatattaccaagttgagaatgagaatatttcttgctagctgacctgacttacaagaaaaaactaaataaagtcattcaggctgaaaagaagtgatattcagtaactcgaacccaaatgaagagataaagaatcacagaactgataaatatgtagatacatataaaagactgtacaaatatagatatatgtttttcttcttttaacttctttaaaagacctaagattgcataaaaattataacattgtgttattgtgtttataagcaggaggagcaaaaatggagcttagcagagaaaaatatctaaattttactgtgttaaattagtttgaacttaagtaaattatgatcaattaagatgcatatgtaatctttagagcaagcactaagaaaataaatagttaaaaacaaaatttaaaattacacactaaaaataactaacaagacagtgcagtaaaggagaaacaggaacaaaaaagacatgaataagatgtgaaaaaatacaatatggcacatgtaattgcaactaaaagttgagaattcccattaaaaaaatctgaaatttgaaatgctctaaaatgtgaaactttctgaaggttgatataataccacaagtggaaaatttcacacctgacctgtaatgagtcacagtcaaaacacagccaaaactttgtttcatgcaaaaaattatttaagatactttataaaattacctccaggttatatgtataagatatctattaagatatatatatatacatatatatatatatacatatatatatatatacacatatatatatatatatatgtatatatatagtatgtgtgtttaaacttaggtcctatctccaagatattaggtatatgcaaatattacaaaatctaaagaaatccaaaatccaaaacacttccaatcccaagcattttggatatgggatactcaacctacatatcaatagttatagtaaatgggagtgaactaagcattccaattataggcagagatttcagacaggattatttaaaatatccaaccatagtttgtttaaaagagaaatgtattagagccaaaaccatataatttcaaagaaaaaagaggtactatgcaaattgtttacatataaaaaatgaagtgacaatactaatgtcagacaaaatagactttatgacaaaatatgtaacaagagaaaaagacatttttaattatataaggggtcaattaagcagaaaatataacaattataaacgtatataattaataggaaagtcccaaattctatgatgcagaaattgacagaattcaaaggagaactagacaattcaacaattattattggagacttcaaaccctactctcaatagctggcaggccaattagacagaaaaatagcaacaatatagaagaattcaccaacactatcaaccagcttgacctaactaacatttataggagacgccaccaaatgaaagcagaatacatattattttaaagtgcacatgaaattttctctgggatagattctatgctaggtcaaaaaacaaatctcaatacactcaacaggcttgaattcataaaaattatgttctcttaatatgtcagaattaaattggaattcaacagaaggaaatttggaagatatcaaaatattttgaaattcaacaacttctaaatccattggttaaaaactaaatcacataggaaattataaaatattttgaactgaataaaaataaaagcacaacatgtcaagatttataggatgtaactaaagcagtgcttacagggaaacttctagttttaaatacctattttagaaaagaataaaattcttaaatcattaactcaagctttcgccataagaaactagaaaaagaagaacacagtaagctcgaaggaagcataaggaaggaaataacgggggttagagcagaagtcaataaaatagaagaagaagaaagaaaaatcaatgaaaccatacattaatctttgaaaatattttttacatggagaagctttagctagactgaccaaaaaaaaaagaattaccaaaatcataaaggaaaaaggggtaattactaccaaccctacagaaattagaaagactagaatgtaataacatgaacaacattgtcaacaatttctgcaaaacatattaaatgaaaaaattcttagaaagacataaattaacaaaactgattcaagaaaaaaatagacatatgaatagacctaacacaaacacagaaactgaattagtaatttaaaattttccaacaaaaaaacccaggtccaggagaaagataggaatccgaggcatccacagtatagaagaagaaatgaaactctctttattcacagacaatacaatcctgtatgtagaaaaatctgatatccacaaaataactgctagatctgataagttcatgaagcttgcaagataatcaatatacaagaataaattacattcctgtgtactagcaataaaaaattgaaaatgatactaagaaaataatttcattctttgtagcataaaatagattaaatggtcataaatttgaaaatataagtactaaacctgtactctgaaaactgtaatacattgctgagagaaattaaaaatctaaataaatgggaccatattccatgttcatgaattggaagactcaatactgataaggtagtgattctccccaacttgttctatagatttaatgcaatctccatcgacatcttagcagatgttggcacaaattgaaaaattgcacaatcttggcacaaattgaaaaattgatcccacaatttatatatagcaattcaaatgtaccaaatagccaaaacaattgtgaaaaagaagaaaaaagttagaggactttgaaatcaggacattacctgatttcaaatcttgatgtaaatctgcaatgatgaagacagtgtggtactgtcataaggacaggcttatagatcacctgtaggtttaggaaacaaacctattcatatttttttcttaaatctactaactgcactcctaatgttgacaatggaagagactcgatagtccagcaataaactcttatatttatggtcaatcaatatatgacaaaggtgacaagataatccaatagaagaaaagcttattattgggtagcttattgttagtgtacagaaacagagctgattgttaatacaactcaacaggaaaaaggcaaataacttgatttttaaaatatttaaatatatatttctccaaagaagacatagaaatggccaacaggtatgtgaaaaggtgctcagcatcactagtcatcagggaaatgcaaatcaaaacctctgtgagatgaacactatcatctcacccctgttaggatggctactataaaaacaaaccaaaaacaagagataagaaatgttgttgaggatgtgaggaaatcggaacgctagtacaccataggtggtaatggaaaaatgatgcagctgctatagaacacagtagaaaggttcttgaaaaagttaaaaatagaactaccatatgatccagcaacctcactcctgggtatatatcccaaagaattaaaaccagaatctcaaaaagatatctgcactctcatcttctctgaagcattattcacagtagccaagatatcaatacagcatagctgtgcatggaagaatgcatggataaagaaaatgtggtgtattcatacagggaatattatttggccttaaaagggaaggacgtcctgccatatttgacaatatgtatgaacctggaaggcattatgctaagtgaaataagccagtcaccaaagggcaaatactgaatgattccatttatatgaggtgtctgagacagtcaaactcgtagaaccagagagtagaatgatagtaaccaggggctgggcgaagggggaactgggagttgctgttcaatgagtataaagtttcagttatataatgtaaataagttctaaagatctgctgtacaacatagtgcctgtactgtgcacttaaattattattaagaggatatgtcttaagtgttcctaccataagaagaagaagaagaaggagaaggagaaagtgaagaagaagaaagaaaaaatgaagggggcatgagcaaacttttggagttgatgcatatacttggttaccttgattatggggatggtttcatggttgtatgcttatatcccaattcatcacattgtatacagatgctcctcaccttaggatgggattgtgtcctgataaacccatcataaattgaaaatgttatgagtcaaaagtacattttcaattaatgatattttcaacttacagtgagtatatccagatataaccccatcctcagtccaggattatactaaatgtgtatcgcttttgcaccatggtgaacttcaaaattgtaagtcaaaccatcgtagtcagtcggggaagatctgtttgttaattatggacccatcgtgtacaccttaaatacttaataaagctgttaaatgaaaattaaaagttgactgggcacatggctcatgcctgtcatctcagtgctttgggaggccaaggcaagaggattgcttgaggccaggagttcaagaccagcttgggcacatagcaacattccatctctacataaaattaaaaatgtagccgactgtggtgatgcaagcctgtagtcctagatgctcgggaggctgagttgggagaatttcttgagcccaggagttggaggttacagtgagctataatcatgctaccacaccccaggagaccctgtctcaaaataaataaatagaagctttaaaaaatattggtatctcagtgttcctcattatccactgtatttaaggtttagctacttgtgcttgatgcttgacaaggtaatcttacttttctccctgatattggtatgatgcaaatttactatatatatgacacaaatttatatatgcaatattttctcgttaatggccttttattttactctcattttcattatgctttgccttttaagtcatatagcaaataaattatgtggcattttcttagcaactattaattcaggagaatgggaacagaattctctcatagattcagctggaaggtaatgatggtcagctcccagtggagaaaaaaaaaaaaactcccttcagttttcgtaaacatacagagaaattttctcctaagtgctatgtcagtctgctgtatgtcctattgatctgagaaccagaaaacacatattttagtttacactgccttgactctattgtacatggctaggtctgtttaaaaaagaaatccttgaagataccctttggattctagtattttaaaacggatgcttagctaagtgaagtggtctacttcaaggatcaaaaccaatcttgagtaatctgttaggtagactccctaagttcatctgtaccttgtaccaaatttttaatgaatttagtaattgacatggatgtaaaataaataatacactaataaagttcatgcagaatcaaattttaatgcccagaggtaatgtagaagatattacctgtccatttctctggacttagctcctgcaactctccatttttctctctaaactttagccacactgaattcctagtttcaattcctctgactcgctaagtatttcttctaccttgataaaagctaattcctttgtcttgtaccatctgtattccggctgatattgacatagttttcagggctcaatttcaatgttacttactcagagggactcactgttacaaccaccacagccttttcaatctaagtaagatccactgctcttcttagaaacaggttatattccaaatgactgtaagtgcttttgttcttagaacatatgtctccattcaaaagaccgatagatattcagttaagccctttgagaaaattataaatgttgaggaccttgattattattgttattattgcttcttttctatgttttcccaggactctcaacaaatttgctttgcttttgtactcatggcacataatgagattaataatgtttagaaaacatttcaaaaatacacacagaggagacacatcttagtctaaagttagacatgataccaaaaactataataactatagctgaccagtgaccccatttattcatggaaagtaaaatttgatgcatatttgcctttaggagcaacatacctatgaaagttctgaaagtgaaagtttgtaaaaaaggagtactctcctaacaatcttaatttttttctatatatatgtatggtttgcattaaactcttttgtatgattagtggtttaatgttgatgtcacccatgacaccataagctacgtgtatggactggctctgttttgttcactcctgaatatccagcaaaaatagtatagtgcctggcccttggtagatgtgtaataaatgtttggtgaatgcatagctacacttcaatgcttatcgcattttaatcccagctactcggaggctgaggcaggagaatcgtttgaacccaggaggtggaggttgctgtgagccaagatcgcgccactgcaccccagcctgggtgacagagcgagactccatctcaaaaaataaaaacaataaaaaaaaggagacccattcatgtatctgtatcactgactagcctgtcaacattttgttaactacctcatcaagtagcaaaatcagtacctggtatgtggtagatgctcaaatatttgttgataaaatacagtaagttaatgacaggcgagcttgcctcagtgaaatataatctgtaagtgagcagtgtgtatatcatttgaaggtgccctacttagcctagcatatcacagagattcccagtaaatatttaggcagttcattaactctaaaagttgaccctcatagtcattggcctacattattcacctccctctgtctctaataaattcattggcaaatttctgaactccaactggaatgtttgtggtggatttcttcatacctaatggattatttcaattttcattttacattgtattatttacttgtctgaggtctttataatgacaaactcggcatgcatgataagctgtcattacttatgccagttgacaaggacatattatttttctacaaaaaaaattatcttggccaggcgcggtgcctcacgcctgtaatcccagcactctgggaggccgaggcgggcggatcacgaggtcaagagatcgagaccatcctggtgaacatggtgaaaccctgtctctgttaaaaatacaaaaaaaaaaaaaaaaaagcagaacaaaacaaaacaaacaaacaggagtggtggcgggcgcctgtagtcccagctactcgggaggctgaagcagaagaattgctcgaacccgggaggcagaggttgcagtgagccgagatcgcaccactgcactccagccgggcgacagagtgagactccgtctcaaaaaaaaaaaaaaaagtggtaattgttcaaaatatttacttattaattcattttaaaattgcatgttgaaataaaaaataaatgtttagtttttaaactatctcttctacaacagaaacaatatagtgagaagagtgatcttgttttacatttttgcaaatctctttaaaagttagcttaagagaaggcagctggttcttatatctgtttctgcattgaatgtgctgtcatatctcgcatcatgtagcctctgaaaaactcataatagaatgagagaggaaaaagtcaaataacatcttagtattattacgaaaataatttggacctcacagaaccactgcatgggtctcagggactcccaggggtccccagaccacatttaaggaaatactgtttcagggaatataactatttttgtacctcctgtggctatattcttttaaagaatagtaacctctgtttctgaggaacttagctgcaattatgtgcagagtttaaataagtgaaacggaaataccctttgcctttctgctcgagtatgaaagtgatgatcaaaatgttcccttttctctctctctctctctctctctctctctctctctctctctctctctctcactctctggggaacttcgggtttccgtctctatataatgtattcatattccactggaaacatacatagtttgagaaaacagatgacattttttctgggggtggaaagaattactaccacgaggaattcaaaatacagacacagtaataaaaatcaccataaagcccagaggggaaaaaaattgagtaacaaaataggaggtgaaattataaaactgagtaacaaaaaagaggtgaaattataaaataaatgataaagttggttgtgggttaggaagaaagagaaatataaagaaactggcataatgtaaaagccaagacaagaaaagtgaggcagaggcataggtcttttgactattttccatgtttgattctaaggtaagtagatatagtttctcatagttggaaatgttcgtgaatttaaacagaattaatgtttataatcagatgcaatgtctagtttttctatttgtcctgtgaaataataattgtgtaaagtgctcatgattgtttcaaggggtgaggagtagttctaattatcatagatattttcatgacttcgcataccactggtttatagagattatacagattttcttatatcagaactctcgtatctttaattccctagtagatgtctaagaaggagatttatcacatagcagatggtggtaaacttgagtaaagtgccagatactaaatgcctttggctttgtgggccattcaatctttgctgcaactactcaactctgctattgtagcatgaaagtaaccatagacaatatgtaaatgaatgagtgtagctctgttccagtaaaactttatttacaaaaacaggtggtgagcacaacttggttcatgagccatagtttacaaacacttgctgtatagctttccctggttgaatttcgttaattttatacagaacctgcctcccatacacacacactttgttcttcatggaaaatctccccagactactatgaaataatgttattacttggagatatacaattaagatgatgtcattaggagattattaatataggaactaagcaaatactatatgctaagtactgaggatagggtgcgatcacaatagatagaaaatctgcaatagtttgatgaacatgggaaattacagtatttcctgtgatggaaacattatgaggggctgtgggactacataacaggacctgtgacctatacctgggttggggatgtctaattaatcaaggaaagctttgtagaggaagtgatgtctaacctgagattggaaaggtcaacctggagctacctagatgaagatgtatggaaggacatcccaggcagagggaacattgtatgatgaatcctgatatggatatagtgctggattttaaggaagagtaagttgttccatgaactatacagtgcaaagaaagatgaagaaatagaagtagagaccagatcacaaagggctttttgaccatgttagagaagttatattttatcccattggcactaggatgttgttgagtatatgaggacatgatcagcaacatattttagaaagatctcttattctgaagtgtaaagagtggataagaaggagacaaggtaggaggcacgagctaattagaaagcagtctcagagaggctgttagaaatcagaacagaatggctattattaaaaagtcaaaaaacaacagatgatggtgaggcttcagagaaaagggaatgcttatacactgtttatgggaatgtaaatgagtttaggcactgtggagagcagtttgaaaatttctcaaagaacttaaaagagagctgccattcaacccagcaatctcattacttggtatatatttaaaagaacacgaatctttctaccaaagagacacatgtactcacatgttcgtcgcagcactatacagtaacaaagacatggaatcaacctaggtgcccaccagtggtggattgaatgaaataaacgtggtatacatgcaccatggaatactacacagtcataaaaagcatacagtcacgccttttgtaggaacatggatgcagctggaggtcattatcctaagtgaattaatgcaggaacagaaaaccgaagatagttagaagctaaacattgggtactcattataaaggtgaaaacaatagacattggggactactagaagggggaggaaggagaggggcaagggttgaaaaactacctatcgggtactatgctcactacctgtgtgtggtgggatcatttttaccctaaaccttggcatcacacaacatactcaggtaacaaacctgtacgtatactacctggatcaaaaataaaagttgaaatcagaatgagaaggagcgaaggagacagcgacaggaggatggagagaagtgggcagattcaagagagatttctcaagtggacttatgaggacatgcttattgatacgctctgggagtgagggagagagaagaatcaaggatgacttctacactttcagcttaaaaaaccgggagctggtggagtcatccattgaacttgacagaggagcacgtttaggcaggaagatgatggtgtttgaatgtctgcgaagggaaaaactgaactgggattcaaatcagaaaaaacggtttgaagtcataccctcttaattgcattttctatcggatggtaatggctttgtgacaggctttactgataggtgatgtaactctgcctctgacagatgaagatccaaagcatcctcagattttcccgaagcctgtttcagcaactgtgtagacagcacacacaaaaatctggggggaagtcctagggctcagttagttgattggatctattaaagtagcattggagaacacagttcagtctgagatttcccaaacatattgctctataatttatttttacccagaaactgaattcgatgtgggatagggattataaaagccttcagattccagatagaatctctgaatagaaggcttttgggccacatctagtaatctcctttcctcactccatttctgaacttcttgttcacttcttcgctgtttttaggacgttcttactacactcctgcctcaaggcctttgtacttgttttctctgcttagggcgttctttcccgcaatatttgcatggcctcctccctcgcttctttatttctatattacctatctttattaaagctgctataaaaaaaaaaaagcccacacctcagtggcttaacataatagaaactttccgttcatgcaaactttacaaaaattttctggtcaacaagtagatttcctccaaatggtggatcaggggggcccagggcacttcgcttttgtggctctgatgtctttaacatacggatttcaaaatcactgtgctcttgtacataagaatgaaaaagaacaaggaatattacatatgtggtggtggttattggaggtggggttatgagccaggcttcatattcatgagcatcacttttgctcacactccattggctcgaactcagtcatgtagccaaactaatggcaagggagactgggaaatgacagctagctgcacaattaagagaaatgagtagacttgtctaatgagcagctagccagtccctaccacgaggactttgctcaaatgtctccttctccatggaaccttctatgatcaccctttataaaatcacaactgctccccatcttcccctcaatatttccatcccttttccatgcttcatttttttcctctgtaacacttactgtatcacaatctatagattttatttctttatcttgtttactgtctgcctccccttcctcccaatcggatgtaaggtccatgaggcagggattgctgccgatattcacggccatatcaatggacactagtagaccctcaataaatggctgttgcattgtgattacatatatgcttcacctagaagtagtctcatctggtggcacatttactcatagattgacattaattctctattgttttttccccagcaaaatttgtcaaggtagtttgtcagtagggagaaataaagttgtcaggtggctcatcaaaagttcaattttgagtactcctcctgtgtactcataatgttttataaatacttttatctatgtaagcacgtgggcttagacacaattctaggattaaaacagaaagctctgtatccatattttcccttttttgtacctccttttatgttctctaccattttttttgagtgctgttagtgaagcactaggctaaatcttgggtttctgcaaaaaaaactttaatcctcacaacactctaaaatgtttattgttctaattttaagacgaggaaactgagggctaaagagattaaggaactcgcccgtgttcacgtactcagctgataactggcagcatttagatttggacttactttccatacagatattcgcattgctaaccttcaggtttttccctcatcgttttccacatctactcaaaagttgctaatcatttccttaatagtgaggcataaatgactgagaaatcttgatatattatccccctcaggagcacttcattccgacaagacacaaactttagggaaaatgaacaaatgtctacttgtacaactcaagcaccaaccaggtatggtagacatgttggcttaaaaataaagttgatgcttgggttctgattctgataatgacctacggagggtatggcctgaggaggttactaggtgtgtgtagaaatcaatgttttgttttggttttccctcgggaagggtcaacttatacttgaatccttctgaagtttctcaaattacaagatggtcatttattttacttcaatcaaaacaacaaagtactgtccgggaaagatgtattgccttgacttattctcaatttatgcttattttggaggcttgtagaagtaaacctgatagaggagggcaaaaacacacacacacagacacacacacactgggagaaaataaatttaacacagtttagggattgactttggttgtatgacatcacaattgcaagagttggatgccattgtaaacaagctatggaaagaatactgttaaaagtaactcattaagtggttacatggtgtagctcatggacatatggcacagaaaaaagataaagctgtctttacataacataaaactgtattctgttatgtaaatgtgtgcttgtggcttgcagtaaaattcctagtgaaacattacctctagattcagcagtactatacctcaggccacatggatgtaagtaaagatgatgccctctggaaaactgagttaggcaacaacaagtgcatccatgaggatgcaaatttcaatgttgaaggtgcctgtgaagaatttgaacaaaattgttgcatgaaatatgaatgaagaagtgtgatctaatgacataatattttgtactatataattttaaagtagtacacacaatcaaattaatgaattaaacattatatgtaaacaggtgatcattgtatctccattttctaaagtttctatgttaaaggtgatcaaaaaacttggagagagggacttctcatttggaaaatgggatagtcacctttgggtatgtgatgtatcaatctctagaacttcagtttcttcattgaaagcatataaaaggcaatccaaaggatgtatggaatattaaaagattccactgtgaaactatctagcactttacctgaaacacttgttagatcccctcaccaaaatcatgccatgtgatttggcagtctattcctcttagcgtaagagtagcccgacagaaaatgttcattaagagttaatgttaaattcattgaatttagcaacacatgagtagcgcttcctttctgattatgcaaatctctcaccatcgtaatacgtgcttcctttaatttcattgggaacatttgtaatgtaaatggtaacagagccaatatttcaaacagaagccattctttctaaaaaaagctaaatgtctaaatgtattgaaatgcttctaaaagtaaaatatttagcacttatttgcagatgggtaatgttaaatatctcactcattattattactaccacttgtctgaataaatcctcccataagcattaagcaagtaggtaaacaaagaaataacacttcatgtgatgaatgccaatatgaagcacgtttaaactgttctgtcaagagacaagcctggaaatgctaactgtgtttctttgcttttctgcaatcatctgaatacataaattcaaattgcagcttttaaaacttcaaatcgaggcttttgaaatttcagaaaacacatgcgcttggaaaagcagattataacaaggtcccaacgggattttgtcaccatcttttttatatttcaaagtataaaaaaaatctagataagaaatgactaccaaatgttttcatatttaaaagatgctgtttttttaaaaaattaaatcactggaaaaaaagttttccacaaatatcgtgtaaaaagaaagacagcaaaaagcttagccaaagcttttactgtttaagtgatgatttattctgagagttcttaagagttttctaaattagtatatggttaatatccataaaatcatatgcaagatgctgtctttcaaattgatgctgaaggttaattataaaatgtacttaattatttatagtgtcccattgagtcccagatactctgtgtccaagaacactgtaaatacagaaagtttagcagaattatattggaaaggcagtaattcttcacaaattaacttattgatataatgcaatcccatttaaaaattttcagcgagaattgttttataatttgactgaatgatacattacataagttagaataactaaagtgggagagcgggttaacctaccagaaattaaacatattttaaagctgcaataattgacatagtgcattactgtcacaaaaatctacagtagatcaacaagcagaaacttaaaatatcatgaagaaagcaccataaatcaattcagaagagatggtgctgggggaaaaaatatcagtttctgaaaaactcttcaaggttagaaacaacactatataaatttaagatggattaaatatttggttgttcttttttaacaaatgaaagagtaaaggatcaagaataaatgagaatatctgaacaatggtaaaatggccacaattttaaggatactatcaatgaacataatatcaaagaaataaactgttaaattttatttagaaaaaactactaaaaggcaaaaaggaagctggaaacgtagtctcaattaatctatgtttcagataatgtgaaaagagctcttaaaaataggaaaacacaggaaaaatgggcaacagacattgccgataattgacagtggaaactaaataaatgacaaacatgtacacacatacaacattttcaactttcctattagtagaatacttaaaatatctatggcaagctttttatttgttttattggtatatcaattataatgctcaatagtggcaaaagtgtagtgagacaagtattttgtaactgttggtgggagtttacgagtgttctgagtaccaaccttgacagaaattcaacaatgtgtatctaaatccttaggattcccattgttaacttttcattctcattccagcagatacatgattcaaaatgtataaataaatgtgtttattgtagggttattcattataataaaaaatgaaagcaaacaaaattcctaataacacaataatggtgaaatatagggtacccctatatatcttattactaggatcttaaaaaatcaagtttttaaagcgtaattaatgacctacagagacacatagtagaataataaatgaagaaaataagcatacaatatagggtttgaacccagtaatacatataaatctcaactatgatgaataagcacaacatctctcctctgtactggatattcttgatagaaaaaaatatgctagtaaataatttgagacatatttgaaaagaggggagtgtttgatttagaattttctaaacttgagggttattattatttttttggtttgatattactttttcctgctccttaaatttttgtttgtttggggggtttggggttttcttttccttaaacgtgtctgcttctagatgaaagttgaaaatgtttaaaagccttgccaatgtgtctaggtttttcaaatgtaatcagattttagcaagattttacttaactaaaagtattcagaacactgtgcaaaatcatctggagtcaaatagtaatggaggcaatgatttgcagagtagaaacagagagagagaaaaagatgagatagaccctcaaaatctagacccaaggaattaaatctgcttggaacatttaaacaaataaaggatgcctgtactatactagacgttttcttcttccacaattgattctaaggtcagaatctgaggggaaatggtgctgttccacattctaaaacaaactgccagcaatcgagaccagccacttccccatagggtttactctaaagcaacagggattattatctctattccaagcaatttccaatctcctctgtactccgtgtcccaggcaagattaaaaagactcaggtaggaaggggtagtaagctttgtggggagtgcagtttgtggtaagggacagttccttctctttcatctctctgagtcagaagtagagacttcgagagaatcactgagagtaagtatgtagactccaagaaggaaaaagcatcctctcacttcaatgaatgtttggaatctgcagacctccttcccaggtctgtgtagcttttggagaggccagaagagcaccgtaggcattcctttggctttccatggccaagcacatagagtagaagaagaggaggaaccgtaaggttaaccatacataagaaatcaacaaaaggctttgaaattgacttttcctatttttcaatttaaataagagagaattgtcaatgattaaaattcataaaacgaagaaagaatggactcagaaaatagcaaacatgaaatgttaattattagttcaaaagttagtttaccgtgttttctctgccaactgattgctaatgactaaagtccttatttccagctttcctctctccccgagctccagatctcttgatttattaaactagtagtttccccaaaatatatgagacaacaaaatatactctcagctgaagtaaatagcattcatcttcccagtcagataaggcagaagtacttctagatcagatgttatattcgggataggttaaaaacagaccctgctcccagtgtcccaggaatgaacagtggatgtgcttatttctcattgcatgcgtgtatcaaaatatctcacgtaccctacaagtacatacacttactatgtccctacaaaaattaaaaacaataaatcataaacatttgtaaaaataagcgaataaatgtataaatgaatttaaaagagaatagacagaggggagaatgtaactttacgtgtcccagaacagactttgaacaggctcttatcatataggaaaactgaatgaatatatgcaagcataagtccaataaccagattctgatttacagaatgatcgcaactgtagttctctcaaggccctgtctttgaacaggctgtgtcttattcctgcaacatgctgatctatcttcatgcttcaagactcagatcattatcttctctgggatgtctcccaagcactgccccagaaataacttctcctcctataatacttaatcataatccttggcttacatgcttgtttcttctcattgactatgaaatcctcaagacaaggtatataacgtatatatctttaatcctaatgcccaattgagctcttagaaggtagtaagctcccaatacacatttgttaatttgaagcaaaaaaaaaaaaatagctaatcattcaaaaaactgaattatcacaaatgtccatctaaagtactatatttacacaattaaatgctatacagccaggttaatgaacagactaaaattatatgcaacatggattatcgtaaacataattttgaatgaaaaaggcgagacacaaaggagtataaagccatacaattccattttcataatattcagtaccggcaaaataatcaaagttgacagggtactggttatacttggaggcagtgactgcaaagggataagaggagatttctgagattctgataatattctatttccttctctggttgtacagtgtgttcaatttttaaaacactattgggctatacagttaaattgtgcagtgtcctgtacgtatattacacttcagttaaaagcttccatggaagctacacatagttcccaaaagacaacaaaacaaaaaattttcaattattttaagcacaaacaattttgttcagctgtcttacaatcgaatatgtaagaataaatttatggctaattagcatagagttatatgcattttcataattaaaacttccacgagtacaacatatgttaagtattttaaatcagtttttctctttcctcaaataaggttgtgagtcataattcggaaaacagtttagcatgtaataatttagtgttttattttaaaccaagctgaagccacataaagcagaactgctcaactgagccctatccaaatccttgacccacagaataagaagcagataaaatggctgctacttaaacaaaacaaaaaccttgtttatatttttgtcctctcattttccataagtatactttaattaaacattttaaaacttgtaactttaggttatatacttactttagttggttctcaaccagggacaattttgtccccacccccaaccccccagcatatttggcagtgccttgaaacatatttggttgtcacagctcaggggcgaggtgttactactggtatccagtgtgttcaacaggccagggatactgctaaataccctacaatgcagaggatagctgctcacagcaaagaattttccaaacctaaatgttagtaatgctaaagttgagaaaccttgctcagatataatgacataatgttgttagaatttttattttattcattttaatgtatgtatgtatgtatgtatgtacgtacgtatgtatgtatgtatttgagatggagtctttctctgttgcccggggtggagtgcagtggcacgatctcggcttactgcagcctctgccttccacgttcaagtgattctcctgcctcagcctccctagtagctgggattacaggcgcctgccaccaaacctggcaaatttttgtatttttagtgtagacggggtttcaccatatttgccaggctggtcgcaaactcctgacctcaagtgatccgcccacatcggcctccctaagcgctagggttacaggcatgagccactgcgcctggccaggaatttttgaatcagaatttttcttgttcgattttaatctcttatcatttagagattcttgaaatattgaaattactttgttcaaagtgaatgaattttcttaaattatgtatggttaacatcttttaaattgcttatttttaaattgccatgtttgtgtcccagtttgcattaacaaatagtttgagaactatgttggaaaaaaaaataacaattttattcttctttctccag

SEQ ID NO: 968 - DNA, 50 bp, Homo sapiens
  source 1..50: mol_type = genomic DNA
gtagggcgacagatctaataggaatgaaaacattttagcagactttttaa

SEQ ID NO: 969 - DNA, 45 bp, Homo sapiens
  source 1..45: mol_type = genomic DNA
atttcatgagagattataagcagggtgaaaggcactaacattaaa

SEQ ID NO: 970 - DNA, 250 bp, Homo sapiens
  source 1..250: mol_type = genomic DNA
cactgcgcctggccaggaatttttgaatcagaatttttcttgttcgattttaatctcttatcatttagagattcttgaaatattgaaattactttgttcaaagtgaatgaattttcttaaattatgtatggttaacatcttttaaattgcttatttttaaattgccatgtttgtgtcccagtttgcattaacaaatagtttgagaactatgttggaaaaaaaaataacaattttattcttctttctccag

SEQ ID NO: 971 - DNA, 60 bp, Homo sapiens
  source 1..60: mol_type = genomic DNA
aaaataacaattttattcttctttctccaggctagaagaacaaaagaatatcttgtcaga

SEQ ID NO: 972 - DNA, 148 bp, Homo sapiens
  source 1..148: mol_type = genomic DNA
gctagaagaacaaaagaatatcttgtcagaatttcaaagagatttaaatgaatttgttttatggttggaggaagcagataacattgctagtatcccacttgaacctggaaaagagcagcaactaaaagaaaagcttgagcaagtcaag

SEQ ID NO: 973 - DNA, 50 bp, Homo sapiens
  source 1..50: mol_type = genomic DNA
gctagaagaacaaaagaatatcttgtcagaatttcaaagagatttaaatg

SEQ ID NO: 974 - skipped

SEQ ID NO: 975 - protein, 7 aa, synthetic construct
  REGION 1..7: note = Synthetic
ASSLNIA

SEQ ID NO: 976 - protein, 12 aa, synthetic construct
  REGION 1..12: note = Synthetic
SKTFNTHPQSTP

SEQ ID NO: 977 - protein, 12 aa, synthetic construct
  REGION 1..12: note = Synthetic
TARGEHKEEELI

SEQ ID NO: 978 - protein, 9 aa, synthetic construct
  REGION 1..9: note = Synthetic
CQAQGQLVC

SEQ ID NO: 979 - protein, 9 aa, synthetic construct
  REGION 1..9: note = Synthetic
CSERSMNFC

SEQ ID NO: 980 - protein, 9 aa, synthetic construct
  REGION 1..9: note = Synthetic
CPKTRRVPC

SEQ ID NO: 981 - protein, 20 aa, synthetic construct
  REGION 1..20: note = Synthetic
WLSEAGPVVTVRALRGTGSW

SEQ ID NO: 982 - protein, 9 aa, synthetic construct
  REGION 1..9: note = Synthetic
CMQHSMRVC

SEQ ID NO: 983 - protein, 7 aa, synthetic construct
  REGION 1..7: note = Synthetic
DDTRHWG

SEQ ID NO: 984 - protein, 10 aa, synthetic construct
  REGION 1..10: note = Synthetic
GYTFTNYWMH

SEQ ID NO: 985 - protein, 17 aa, synthetic construct
  REGION 1..17: note = Synthetic
EINPINGRSNYGERFKT

SEQ ID NO: 986 - protein, 7 aa, synthetic construct
  REGION 1..7: note = Synthetic
GTRAMHY

SEQ ID NO: 987 - protein, 11 aa, synthetic construct
  REGION 1..11: note = Synthetic
RTSENIYNNLA

SEQ ID NO: 988 - protein, 7 aa, synthetic construct
  REGION 1..7: note = Synthetic
AATNLAD

SEQ ID NO: 989 - protein, 10 aa, synthetic construct
  REGION 1..10: note = Synthetic
QHFWGTPLTF

SEQ ID NO: 990 - protein, 116 aa, synthetic construct
  REGION 1..116: note = Synthetic
QVQLQQPGAELVKPGASVKLSCKASGYTFTNYWMHWVKQRPGQGLEWIGEINPINGRSNYGERFKTKATLTVDKSSSTAYMQLSSLTSEDSAVYYCARGTRAMHYWGQGTSVTVSS

SEQ ID NO: 991 - protein, 107 aa, synthetic construct
  REGION 1..107: note = Synthetic
DIQMTQSPASLSVSVGETVTITCRTSENIYNNLAWYQQKQGKSPQLLVYAATNLADGVPSRFSGSGSGTQYSLKINSLQSEDFGNYYCQHFWGTPLTFGAGTKLELK

SEQ ID NO: 992 - protein, 9 aa, synthetic construct
  REGION 1..9: note = Synthetic
YTFTNYWMH

SEQ ID NO: 993 - protein, 17 aa, synthetic construct
  REGION 1..17: note = Synthetic
EINPINGRSNYAQKFQG

SEQ ID NO: 994 - protein, 17 aa, synthetic construct
  REGION 1..17: note = Synthetic
EINPINGRSNYAEKFQG

SEQ ID NO: 995 - protein, 17 aa, synthetic construct
  REGION 1..17: note = Synthetic
EINPIQGRSNYAEKFQG

SEQ ID NO: 996 - protein, 7 aa, synthetic construct
  REGION 1..7: note = Synthetic
AATNLAE

SEQ ID NO: 997 - protein, 11 aa, synthetic construct
  REGION 1..11: note = Synthetic
RTSENIYSNLA

SEQ ID NO: 998 - protein, 7 aa, synthetic construct
  REGION 1..7: note = Synthetic
AGTNLAD

SEQ ID NO: 999 - protein, 116 aa, synthetic construct
  REGION 1..116: note = Synthetic
QVQLVQSGAEVKKPGASVKVSCKASGYTFTNYWMHWVRQAPGQGLEWMGEINPINGRSNYAQKFQGRVTLTVDTSISTAYMELSRLRSDDTAVYYCARGTRAMHYWGQGTLVTVSS

SEQ ID NO: 1000 - protein, 116 aa, synthetic construct
  REGION 1..116: note = Synthetic
QVQLVQSGAEVKKPGASVKVSCKASGYTFTNYWMHWVRQAPGQGLEWIGEINPINGRSNYAEKFQGRVTLTVDTSSSTAYMELSRLRSDDTAVYYCARGTRAMHYWGQGTLVTVSS

SEQ ID NO: 1001 - protein, 116 aa, synthetic construct
  REGION 1..116: note = Synthetic
QVQLVQSGAEVKKPGASVKVSCKASGYTFTNYWMHWVRQAPGQGLEWMGEINPIQGRSNYAEKFQGRVTLTVDTSSSTAYMELSSLRSEDTATYYCARGTRAMHYWGQGTLVTVSS

SEQ ID NO: 1002 - protein, 116 aa, synthetic construct
  REGION 1..116: note = Synthetic
QVQLVQSGAEVKKPGASVKVSCKASGYTFTNYWMHWVRQAPGQGLEWMGEINPINGRSNYAEKFQGRVTLTVDTSSSTAYMELSSLRSEDTATYYCARGTRAMHYWGQGTLVTVSS

SEQ ID NO: 1003 - protein, 107 aa, synthetic construct
  REGION 1..107: note = Synthetic
DIQMTQSPSSLSASVGDRVTITCRTSENIYNNLAWYQQKPGKSPKLLIYAATNLADGVPSRFSGSGSGTDYTLTISSLQPEDFATYYCQHFWGTPLTFGGGTKVEIK

SEQ ID NO: 1004 - protein, 107 aa, synthetic construct
  REGION 1..107: note = Synthetic
DIQMTQSPSSLSASVGDRVTITCRTSENIYNNLAWYQQKPGKAPKLLIYAATNLADGVPSRFSGSGSGTDYTLTISSLQPEDFATYYCQHFWGTPLTFGGGTKVEIK

SEQ ID NO: 1005 - protein, 107 aa, synthetic construct
  REGION 1..107: note = Synthetic
DIQMTQSPSSLSASVGDRVTITCRTSENIYNNLAWYQQKPGKAPKLLIYAATNLAEGVPSRFSGSGSGTDYTLTISSLQPEDFATYYCQHFWGTPLTFGGGTKVEIK

SEQ ID NO: 1006 - protein, 107 aa, synthetic construct
  REGION 1..107: note = Synthetic
DIQMTQSPSSLSASVGDRVTITCRTSENIYSNLAWYQQKPGKAPKLLIYAGTNLADGVPSRFSGSGSGTDYTLTISSLQPEDFANYYCQHFWGTPLTFGGGTKVEIK

1. A complex comprising an anti-transferrin receptor 1 (TfR1) antibody covalently linked to an oligonucleotide configured for inducing skipping of exon 45 in a DMD pre-mRNA, wherein the oligonucleotide comprises a region of complementarity that is complementary with at least 8 consecutive nucleotides of any one of SEQ ID NOs: 240, 236, 280, 211, 197, 212, 208, 217, 213, 195, 160-194, 196, 198-207, 209, 210, 214-216, 218-235, 237-239, 241-279, and 281-399.

2.-4. (canceled)

5. The complex of claim 1, wherein the anti-TfR1 antibody is a Fab fragment, a Fab′ fragment, a F(ab′)2 fragment, an scFv, an Fv, or a full-length IgG.

6. The complex of claim 5, wherein the anti-TfR1 antibody is a Fab fragment.

7.-8. (canceled)

9. The complex of claim 1, wherein the anti-TfR1 antibody does not specifically bind to the transferrin binding site of the transferrin receptor 1 and/or wherein the anti-TfR1 antibody does not inhibit binding of transferrin to the transferrin receptor 1.

10. The complex of claim 1, wherein the oligonucleotide comprises a region of complementarity to at least 4 consecutive nucleotides of a splicing feature of the DMD pre-mRNA.

11. The complex of claim 10, wherein the splicing feature is an exonic splicing enhancer (ESE) in exon 45 of the DMD pre-mRNA, optionally wherein the ESE comprises a sequence of any one of SEQ ID NOs: 885-912.

12. The complex of claim 10, wherein the splicing feature is a branch point, a splice donor site, or a splice acceptor site, optionally wherein the splicing feature is across the junction of exon 44 and intron 44, in intron 44, across the junction of intron 44 and exon 45, across the junction of exon 45 and intron 45, in intron 45, or across the junction of intron 45 and exon 46 of the DMD pre-mRNA, and further optionally wherein the splicing feature comprises a sequence of any one of SEQ ID NOs: 880-884 and 913-916.

13. The complex of claim 1, wherein the oligonucleotide comprises a sequence complementary to any one of SEQ ID NOs: 160-399 or comprises a sequence of any one of SEQ ID NOs: 400-879, wherein each thymine base (T) may independently and optionally be replaced with a uracil base (U), and each U may independently and optionally be replaced with a T.

14. The complex of claim 1, wherein the oligonucleotide comprises a sequence of any one of SEQ ID NOs: 720, 712, 760, 691, 677, 692, 688, 697, 693, and 675, wherein each thymine base (T) may independently and optionally be replaced with a uracil base (U), and each U may independently and optionally be replaced with a T.

15. The complex of claim 1, wherein the oligonucleotide comprises one or more phosphorodiamidate morpholinos, optionally wherein the oligonucleotide is a phosphorodiamidate morpholino oligomer (PMO).

16. The complex of claim 1, wherein the anti-TfR1 antibody is covalently linked to the oligonucleotide via a cleavable linker, optionally wherein the cleavable linker comprises a valine-citrulline sequence.

17. The complex of claim 1, wherein the anti-TfR1 antibody is covalently linked to the oligonucleotide via conjugation to a lysine residue or a cysteine residue of the antibody.

18. An oligonucleotide that targets DMD, wherein the oligonucleotide comprises a region of complementarity to any one of SEQ ID NOs: 160-399, optionally wherein the region of complementarity comprises at least 15 consecutive nucleosides complementary to any one of SEQ ID NOs: 160-399.

19. The oligonucleotide of claim 18, wherein the oligonucleotide comprises at least 15 consecutive nucleosides of any one of SEQ ID NOs: 400-879, optionally wherein the oligonucleotide comprises a sequence of any one of SEQ ID NOs: 400-879, wherein each thymine base (T) may independently and optionally be replaced with a uracil base (U), and each U may independently and optionally be replaced with a T.

20. A method of delivering an oligonucleotide to a cell, the method comprising contacting the cell with the complex of claim 1.

21. A method of promoting the expression or activity of a dystrophin protein in a cell, the method comprising contacting the cell with the complex of claim 1 in an amount effective for promoting internalization of the oligonucleotide to the cell, optionally wherein the cell is a muscle cell.
